(19) United States
(12) Patent Application Publication
(10) Pub. No.: US 2022/0195407 A1
(43) Pub. Date: Jun. 23, 2022

(54) OPTIMIZATION OF ENGINEERED MEGANUCLEASES FOR RECOGNITION SEQUENCES

(71) Applicant: Precision BioSciences, Inc., Durham, NC (US)

(72) Inventors: James Jefferson Smith, Morrisville, NC (US); Hui Li, Apex, NC (US)

(73) Assignee: Precision BioSciences, Inc., Durham, NC (US)

(21) Appl. No.: 17/609,244

(22) PCT Filed: May 7, 2020
(86) PCT No.: PCT/US2020/031879

§ 371 Date: Nov. 5, 2021

Related U.S. Application Data
(60) Provisional application No. 62/936,306, filed on Nov. 15, 2019.
(60) Provisional application No. 62/844,586, filed on May 7, 2019.

(51) Int. Cl. C12N 9/22; C12N 15/10; C12N 15/86

(52) U.S. Cl. CPC C12N 9/22; C12N 2710/10043; C12N 15/86; C12N 15/102

(57) ABSTRACT

The invention provides engineered meganucleases, derived from I-Crel, which have substitutions at particular positions that increase the activity of the nucleases for recognition sequences containing certain center sequences. The invention also provides methods of cleaving double-stranded DNA using such engineered meganucleases. The invention further provides methods for improving the activity of engineered meganucleases for recognition sequences containing certain center sequences.

### FIELD OF THE INVENTION

[0001] The invention relates to the field of molecular biology and recombinant nucleic acid technology. In particular, the invention relates to the optimization of engineered, I-CreI-derived meganucleases for recognition sequences comprising certain center sequences.

### REFERENCE TO A SEQUENCE LISTING SUBMITTED AS A TEXT FILE VIA EFS-WEB

[0002] The instant application contains a Sequence Listing which has been submitted in ASCII format via EFS-Web and is hereby incorporated by reference in its entirety. Said ASCII copy, created on May 7, 2020, is named P109070040WO00-SEQ-EPG, and is 1,457 kilobytes in size.

### BACKGROUND OF THE INVENTION

[0003] Genome engineering requires the ability to insert, delete, substitute and otherwise manipulate specific genetic sequences within a genome, and has numerous therapeutic and biotechnological applications. The development of effective means for genome modification remains a major goal in gene therapy, agrotechnology, and synthetic biology (Porteus et al. (2005), Nat. Biotechnol. 23: 967-73; Tzfira et al. (2005), Trends Biotechnol. 23: 567-9; McDaniel et al. (2005), Curr. Opin. Biotechnol. 16: 476-83). One approach to achieving this goal is utilizing site specific, rare cutting nucleases, such as meganucleases (i.e., homing endonucleases).

[0004] Meganucleases are commonly grouped into four families: the LAGLIDADG (SEQ ID NO: 2) family, the GIY-YIG family, the His-Cys box family and the HNH family. These families are characterized by structural motifs, which affect catalytic activity and recognition sequence. For instance, members of the LAGLIDADG (SEQ ID NO: 2) family are characterized by having either one or two copies of the conserved LAGLIDADG (SEQ ID NO: 2) motif (see Chevalier et al. (2001), Nucleic Acids Res. 29(18): 3757-3774). The LAGLIDADG (SEQ ID NO: 2) meganucleases with a single copy of the LAGLIDADG (SEQ ID NO: 2) motif form homodimers, whereas members with two copies of the LAGLIDADG (SEQ ID NO: 2) motif are found as monomers.

[0005] I-CreI (SEQ ID NO: 1) is a member of the LAGLIDADG (SEQ ID NO: 2) family, which recognizes and cleaves a 22 base pair recognition sequence in the chloroplast chromosome. Genetic selection techniques have been used to modify the wild-type I-CreI recognition site preference (Sussman et al. (2004), J. Mol. Biol. 342: 31-41; Chames et al. (2005), Nucleic Acids Res. 33: e178; Seligman et al. (2002), Nucleic Acids Res. 30: 3870-9, Arnould et al. (2006), J. Mol. Biol. 355: 443-58). Methods of engineering I-CreI to target widely-divergent DNA sites, including sites in mammalian, yeast, plant, bacterial, and viral genomes, have previously been disclosed, for example, in WO 2007/047859.

[0006] The DNA sequences recognized by I-CreI are 22 base pairs in length. One example of a naturally-occurring I-CreI recognition site is provided in SEQ ID NO: 3, but the enzyme will bind to a variety of related sequences with varying affinity. The wild-type I-CreI enzyme binds DNA as a homodimer in which each monomer makes direct contacts with a nine base pair “half-site”. The two half-sites of a recognition sequence are separated by a four base pair “center sequence”. These four central bases are not directly contacted by the enzyme. Following cleavage, wild-type I-CreI, and engineered I-CreI-derived meganucleases, produce a staggered double-strand break at the center of the recognition sequence, resulting in the production of a four base pair 3′-overhang (FIG. 1).

[0007] The present invention concerns the central four base pairs (i.e., the center sequence) in an meganuclease recognition sequence that become the 3′ overhang following cleavage. In the case of the native I-CreI recognition sequence in the Chlamydomonas reinhardtii 23S rRNA gene, the center sequence is 5′-GTGA-3′. A number of published studies concerning I-CreI or its derivatives evaluated the enzyme, either wild-type or genetically-engineered, using DNA substrates that employed either the native 5′-GTGA-3′ center sequence or the palindromic sequence 5′-GTAC-3′. Arnould et. al. (Arnould et al. (2007), J. Mol. Biol. 371: 49-65) reported that a set of genetically-engineered meganucleases derived from I-CreI cleaved DNA substrates with varying efficiencies depending on whether the substrate sequences were centered around 5′-GTAC-3′, 5′-TTGA-3′, 5′-GAAA-3′, or 5′-ACAC-3′.

[0008] Furthermore, WO 2010/009147 (the '147 publication) disclosed that engineered meganucleases will cleave different recognition sequences with varying efficiencies depending on the center sequence. The '147 publication describes general rules for engineered meganuclease targeting and cleaving of recognition sequences based on their center sequences, and the efficiency with which such sequences can be cleaved.

[0009] However, the '147 publication does not describe whether I-CreI-derived meganucleases can be modified to improve their activity and/or specificity for cleaving a recognition sequence with specific center sequences. Indeed, it was previously believed that subunits of wild-type I-CreI and I-CreI-derived meganucleases did not directly interact with the center sequence. Accordingly, the present invention advances the art by identifying particular positions and residues which allow for the optimization of I-CreI-derived meganucleases for recognizing and cleaving recognition sequences having specific center sequences.

### SUMMARY OF THE INVENTION

[0010] One aspect is an engineered meganuclease that binds and cleaves a recognition sequence comprising a center sequence consisting of ACAA, ACAG, ACAT, ACGA, ACGC, ACGG, ACGT, ATAA, ATAG, ATAT, ATGA, ATGG, TTGG, GCAA, GCAT, GCGA, GCAG, TCAA, or TTAA, wherein the engineered meganuclease comprises a first subunit and a second subunit, wherein the first subunit and the second subunit each comprise an amino acid sequence derived from SEQ ID NO: 1, and wherein the first subunit and the second subunit each comprise a substitution at one or more positions corresponding to positions 48, 50, 71, 72, 73, and 74 of SEQ ID NO: 1.

[0011] In some embodiments, the center sequence consists of ACAA.

[0012] In some embodiments, the first subunit comprises one or more of the following residues: (a) a K or L residue at a position corresponding to position 48 of SEQ ID NO: 1; (b) a C, R, T, K, or S residue at a position corresponding to position 50 of SEQ ID NO: 1; (c) a G or R residue at a position corresponding to position 71 of SEQ ID NO: 1; (d) an R or Q residue at a position corresponding to position 72 of SEQ ID NO: 1; and (e) an A or C residue at a position corresponding to position 73 of SEQ ID NO: 1.

[0013] In some embodiments, the second subunit comprises one or more of the following residues: (a) a K, T, S, or A residue at a position corresponding to position 48 of SEQ ID NO: 1; (b) a C, R, E, K, or T residue at a position corresponding to position 50 of SEQ ID NO: 1; (c) a G or A residue at a position corresponding to position 71 of SEQ ID NO: 1; (d) a T, R, S, P, N, G, or A residue at a position corresponding to position 72 of SEQ ID NO: 1; (e) a V or I residue at a position corresponding to position 73 of SEQ ID NO: 1; and (f) an S, T, or A residue at a position corresponding to position 74 of SEQ ID NO: 1.

[0014] In some embodiments, the first subunit comprises residues corresponding to residues 48, 50, 71, 72, and 73 of any one of SEQ ID NOs: 11-33. In some embodiments, the second subunit comprises residues corresponding to residues 239, 241, 262, 263, 264, and 265 of any one of SEQ ID NOs: 11-33. In some embodiments, the first subunit comprises one or more of the following residues: (a) an A or G residue at a position corresponding to position 19 of SEQ ID NO: 1; (b) a Q or E residue at a position corresponding to position 80 of SEQ ID NO: 1; (c) a K or R residue at a position corresponding to position 139 of SEQ ID NO: 1; and (d) an S or G residue at a position corresponding to position 154 of SEQ ID NO: 1.

[0015] In some embodiments, the second subunit comprises one or more of the following residues: (a) a G, A, or S residue at a position corresponding to position 19 of SEQ ID NO: 1; (b) a Y or C residue at a position corresponding to position 66 of SEQ ID NO: 1; (c) a Q or E residue at a position corresponding to position 80 of SEQ ID NO: 1; (d) a Q or R residue at a position corresponding to position 92 of SEQ ID NO: 1; (e) an E or G residue at a position corresponding to position 117 of SEQ ID NO: 1; and (f) a K or R residue at a position corresponding to position 139 of SEQ ID NO: 1.

[0016] In some embodiments, the first subunit comprises residues corresponding to residues 19, 80, 139, and 154 of any one of SEQ ID NOs: 11-33.

[0017] In some embodiments, the second subunit comprises residues corresponding to residues 19, 66, 80, 92, 117, and 139 of any one of SEQ ID NOs: 11-33.

[0018] Another aspect is a method for cleaving double-stranded DNA at a target site comprising a meganuclease recognition sequence comprising a center sequence consisting of ACAA, the method comprising contacting the double-stranded DNA having the target site with an engineered meganuclease described herein, wherein the engineered meganuclease binds and cleaves the recognition sequence.

[0019] In some embodiments, the center sequence consists of ACAG.

[0020] In some embodiments, the first subunit comprises one or more of the following residues: (a) an R residue at a position corresponding to position 50 of SEQ ID NO: 1; (b) a G or R residue at a position corresponding to position 71 of SEQ ID NO: 1; (c) an R, K, Q, P, or T residue at a position corresponding to position 72 of SEQ ID NO: 1; and (d) an A or C residue at a position corresponding to position 73 of SEQ ID NO: 1.

[0021] In some embodiments, the second subunit comprises one or more of the following residues: (a) a C residue at a position corresponding to position 50 of SEQ ID NO: 1; (b) a G, S, or D residue at a position corresponding to position 71 of SEQ ID NO: 1; (c) an R or G residue at a position corresponding to position 72 of SEQ ID NO: 1; (d) an R residue at a position corresponding to position 73 of SEQ ID NO: 1; and optionally (e) an R residue at a position following a position corresponding to position 73 of SEQ ID NO: 1.

[0022] In some embodiments, the first subunit comprises residues corresponding to residues 50, 71, 72, and 73 of any one of SEQ ID NOs: 36-43.

[0023] In some embodiments, the first subunit comprises residues corresponding to residues 50, 71, 72, and 73 of any one of SEQ ID NOs: 36-43.

[0024] In some embodiments, the first subunit comprises one or more of the following residues: (a) an A or G residue at a position corresponding to position 19 of SEQ ID NO: 1; (b) an F, I, or L residue at a position corresponding to position 54 of SEQ ID NO: 1; (c) a Q or E residue at a position corresponding to position 80 of SEQ ID NO: 1; and (d) an S or P residue at a position corresponding to position 158 of SEQ ID NO: 1.

[0025] In some embodiments, the second subunit comprises one or more of the following residues: (a) a G, A, or S residue at a position corresponding to position 19 of SEQ ID NO: 1; (b) a V or A residue at a position corresponding to position 59 of SEQ ID NO: 1; (c) a Y or H residue at a position corresponding to position 66 of SEQ ID NO: 1; (d) a Q residue at a position corresponding to position 80 of SEQ ID NO: 1; (e) an I or T residue at a position corresponding to position 81 of SEQ ID NO: 1; and (f) a K or R residue at a position corresponding to position 139 of SEQ ID NO: 1.

[0026] In some embodiments, the first subunit comprises residues corresponding to residues 19, 54, 80, and 158 of any one of SEQ ID NOs: 36-43.

[0027] In some embodiments, the second subunit comprises residues corresponding to residues 19, 59, 66, 80, 81, and 139 of any one of SEQ ID NOs: 36-43.

[0028] In some embodiments, the second subunit further comprises an R residue inserted between positions corresponding to positions 73 and 74 of SEQ ID NO: 1.

[0029] Another aspect is a method for cleaving double-stranded DNA at a target site comprising a meganuclease recognition sequence comprising a center sequence consisting of ACAG, the method comprising contacting the double-stranded DNA having the target site with an engineered meganuclease described herein, wherein the engineered meganuclease binds and cleaves the recognition sequence.

[0030] In some embodiments, the center sequence consists of ACAT.

[0031] In some embodiments, the first subunit comprises one or more of the following residues: (a) a K, S, I, L, or N residue at a position corresponding to position 48 of SEQ ID NO: 1; (b) a Q, S, R, or K residue at a position corresponding to position 50 of SEQ ID NO: 1; (c) a G or R residue at a position corresponding to position 71 of SEQ ID NO: 1; (d) an R or T residue at a position corresponding to position 72 of SEQ ID NO: 1; and (e) an A or G residue at a position corresponding to position 73 of SEQ ID NO: 1.

[0032] In some embodiments, the second subunit comprises one or more of the following residues: (a) an H, T, G, A, S, L, or K residue at a position corresponding to position 48 of SEQ ID NO: 1; (b) an S, K, C, N R, G, or Q residue at a position corresponding to position 50 of SEQ ID NO: 1; (c) an S, G, R, T, K, or E residue at a position corresponding to position 71 of SEQ ID NO: 1; (d) a T, K, A, S, R, H, G, or N residue at a position corresponding to position 72 of SEQ ID NO: 1; (e) an H, A, C, S, G, or R residue at a position corresponding to position 73 of SEQ ID NO: 1; and (f) an S, C, or A residue at a position corresponding to position 74 of SEQ ID NO: 1.

[0033] In some embodiments, the first subunit comprises residues corresponding to residues 48, 50, 71, 72, and 73 of any one of SEQ ID NOs: 46-67.

[0034] In some embodiments, the second subunit comprises residues corresponding to residues 239, 241, 262, 263, 264, and 265 of any one of SEQ ID NOs: 46-67.

[0035] In some embodiments, the first subunit comprises one or more of the following residues: (a) an A, G, or S residue at a position corresponding to position 19 of SEQ ID NO: 1; (b) an F or I residue at a position corresponding to position 54 of SEQ ID NO: 1; (c) a Q or E residue at a position corresponding to position 80 of SEQ ID NO: 1; and (d) a K, H, or R residue at a position corresponding to position 139 of SEQ ID NO: 1.

[0036] In some embodiments, the second subunit comprises one or more of the following residues: (a) an A, G, or S residue at a position corresponding to position 19 of SEQ ID NO: 1; (b) a Q or E residue at a position corresponding to position 80 of SEQ ID NO: 1; (c) an I or T residue at a position corresponding to position 81 of SEQ ID NO: 1; (d) a P or H residue at a position corresponding to position 83 of SEQ ID NO: 1; (e) an E or G residue at a position corresponding to position 117 of SEQ ID NO: 1; and (f) a K, R, T, or H residue at a position corresponding to position 139 of SEQ ID NO: 1.

[0037] In some embodiments, the first subunit comprises residues corresponding to residues 19, 54, 80, and 139 of any one of SEQ ID NOs: 46-67.

[0038] In some embodiments, the second subunit comprises residues corresponding to residues 19, 80, 81, 83, 117, and 139 of any one of SEQ ID NOs: 46-67.

[0039] Another aspect is a method for cleaving double-stranded DNA at a target site comprising a meganuclease recognition sequence comprising a center sequence consisting of ACAT, the method comprising contacting the double-stranded DNA having the target site with an engineered meganuclease described herein, wherein the engineered meganuclease binds and cleaves the recognition sequence.

[0040] In some embodiments, the center sequence consists of ACGA.

[0041] In some embodiments, the first subunit comprises one or more of the following residues: (a) a K residue at a position corresponding to position 48 of SEQ ID NO: 1; (b) a V, R, T, W, or A residue at a position corresponding to position 50 of SEQ ID NO: 1; (c) a G or P residue at a position corresponding to position 71 of SEQ ID NO: 1; (d) an R or P residue at a position corresponding to position 72 of SEQ ID NO: 1; and (e) an A residue at a position corresponding to position 73 of SEQ ID NO: 1.

[0042] In some embodiments, the second subunit comprises one or more of the following residues: (a) a K, H, T, A, G, or Q residue at a position corresponding to position 48 of SEQ ID NO: 1; (b) an R, S, C, I, V, or G residue at a position corresponding to position 50 of SEQ ID NO: 1; (c) a G residue at a position corresponding to position 71 of SEQ ID NO: 1; (d) an R or H residue at a position corresponding to position 72 of SEQ ID NO: 1; (e) an I or V residue at a position corresponding to position 73 of SEQ ID NO: 1; and (f) an S or A residue at a position corresponding to position 74 of SEQ ID NO: 1.

[0043] In some embodiments, the first subunit comprises residues corresponding to residues 48, 50, 71, 72, and 73 of any one of SEQ ID NOs: 70-89.

[0044] In some embodiments, the second subunit comprises residues corresponding to residues 239, 241, 262, 263, 264, and 265 of any one of SEQ ID NOs: 70-89.

[0045] In some embodiments, the first subunit comprises one or more of the following residues: (a) an A, G, or S residue at a position corresponding to position 19 of SEQ ID NO: 1; (b) a Q or E residue at a position corresponding to position 80 of SEQ ID NO: 1; and (c) an R residue at a position corresponding to position 139 of SEQ ID NO: 1.

[0046] In some embodiments, the second subunit comprises one or more of the following residues: (a) an A or G residue at a position corresponding to position 19 of SEQ ID NO: 1; (b) a Q or E residue at a position corresponding to position 80 of SEQ ID NO: 1; and (c) a K or R residue at a position corresponding to position 139 of SEQ ID NO: 1.

[0047] In some embodiments, the first subunit comprises residues corresponding to residues 19, 80, and 139 of any one of SEQ ID NOs: 70-89.

[0048] In some embodiments, the second subunit comprises residues corresponding to residues 19, 80, and 139 of any one of SEQ ID NOs: 70-89.

[0049] Another aspect is a method for cleaving double-stranded DNA at a target site comprising a meganuclease recognition sequence comprising a center sequence consisting of ACGA, the method comprising contacting the double-stranded DNA having the target site with an engineered meganuclease described herein, wherein the engineered meganuclease binds and cleaves the recognition sequence.

[0050] In some embodiments, the center sequence consists of ACGC.

[0051] In some embodiments, the first subunit comprises one or more of the following residues: (a) a K, H, Q, L, A, or S residue at a position corresponding to position 48 of SEQ ID NO: 1; (b) a Q, R, K, S, T, or C residue at a position corresponding to position 50 of SEQ ID NO: 1; (c) a G, R, or A residue at a position corresponding to position 71 of SEQ ID NO: 1; (d) an R, P, or H residue at a position corresponding to position 72 of SEQ ID NO: 1; and (e) an A residue at a position corresponding to position 73 of SEQ ID NO: 1.

[0052] In some embodiments, the second subunit comprises one or more of the following residues: (a) an H, K, L, A, S, or N residue at a position corresponding to position 48 of SEQ ID NO: 1; (b) an S, E, K, I, N, or V residue at a position corresponding to position 50 of SEQ ID NO: 1; (c) an S, G, K, A, or R residue at a position corresponding to position 71 of SEQ ID NO: 1; (d) a T, R, A, S, H, or G residue at a position corresponding to position 72 of SEQ ID NO: 1; (e) an H, T, V, I, or C residue at a position corresponding to position 73 of SEQ ID NO: 1; and (f) an S, A, or T residue at a position corresponding to position 74 of SEQ ID NO: 1.

[0053] In some embodiments, the first subunit comprises residues corresponding to residues 48, 50, 71, 72, and 73 of any one of SEQ ID NOs: 92-118.

[0054] In some embodiments, the second subunit comprises residues corresponding to residues 239, 241, 262, 263, 264, and 265 of any one of SEQ ID NOs: 92-118.

[0055] In some embodiments, the first subunit comprises one or more of the following residues: (a) an A, G, or S residue at a position corresponding to position 19 of SEQ ID NO: 1; and (b) a Q or E residue at a position corresponding to position 80 of SEQ ID NO: 1.

[0056] In some embodiments, the second subunit comprises one or more of the following residues: (a) an A or G residue at a position corresponding to position 19 of SEQ ID NO: 1; (b) a Q or E residue at a position corresponding to position 80 of SEQ ID NO: 1; (c) an F or L residue at a position corresponding to position 87 of SEQ ID NO: 1; and (d) a K, R, N, H, or A residue at a position corresponding to position 139 of SEQ ID NO: 1.

[0057] In some embodiments, the first subunit comprises residues corresponding to residues 19 and 80 of any one of SEQ ID NOs: 92-118.

[0058] In some embodiments, the second subunit comprises residues corresponding to residues 19, 80, 87, and 139 of any one of SEQ ID NOs: 92-118.

[0059] Another aspect is a method for cleaving double-stranded DNA at a target site comprising a meganuclease recognition sequence recognition sequence comprises a center sequence consisting of ACGC, the method comprising contacting the double-stranded DNA having the target site with an engineered meganuclease described herein, wherein the engineered meganuclease binds and cleaves the recognition sequence.

[0060] In some embodiments, the center sequence consists of ACGG.

[0061] In some embodiments, the first subunit comprises one or more of the following residues: (a) an R or K residue at a position corresponding to position 50 of SEQ ID NO: 1; (b) an R residue at a position corresponding to position 72 of SEQ ID NO: 1; and (c) an A residue at a position corresponding to position 73 of SEQ ID NO: 1.

[0062] In some embodiments, the second subunit comprises one or more of the following residues: (a) a K residue at a position corresponding to position 48 of SEQ ID NO: 1; (b) an R or P residue at a position corresponding to position 50 of SEQ ID NO: 1; (c) a D residue at a position corresponding to position 71 of SEQ ID NO: 1; (d) a G residue at a position corresponding to position 72 of SEQ ID NO: 1; and (e) an R or G residue at a position corresponding to position 73 of SEQ ID NO: 1.

[0063] In some embodiments, the first subunit comprises residues corresponding to residues 50, 72, and 73 of any one of SEQ ID NOs: 121-135.

[0064] In some embodiments, the second subunit comprises residues corresponding to residues 239, 241, 262, 263, and 264 of any one of SEQ ID NOs: 121-135.

[0065] In some embodiments, the first subunit comprises one or more of the following residues: (a) an F or L residue at a position corresponding to position 54 of SEQ ID NO: 1; and (b) a Q residue at a position corresponding to position 80 of SEQ ID NO: 1.

[0066] In some embodiments, the second subunit comprises one or more of the following residues: (a) an A residue at a position corresponding to position 19 of SEQ ID NO: 1; and (b) a Q residue at a position corresponding to position 80 of SEQ ID NO: 1.

[0067] In some embodiments, the first subunit comprises residues corresponding to residues 54 and 80 of any one of SEQ ID NOs: 121-135.

[0068] In some embodiments, the second subunit comprises residues corresponding to residues 19 and 80 of any one of SEQ ID NOs: 121-135.

[0069] In some embodiments, the second subunit further comprises an R residue inserted between positions corresponding to positions 73 and 74 of SEQ ID NO: 1.

[0070] Another aspect is a method for cleaving double-stranded DNA at a target site comprising a meganuclease recognition sequence recognition sequence comprising a center sequence consisting of ACGG, the method comprising contacting the double-stranded DNA having the target site with an engineered meganuclease described herein, wherein the engineered meganuclease binds and cleaves the recognition sequence.

[0071] In some embodiments, the center sequence consists of ACGT.

[0072] In some embodiments, the first subunit comprises one or more of the following residues: (a) a K, L, S, or H residue at a position corresponding to position 48 of SEQ ID NO: 1; (b) a Q, R, C, S, or V residue at a position corresponding to position 50 of SEQ ID NO: 1; (c) a G residue at a position corresponding to position 71 of SEQ ID NO: 1; (d) an R residue at a position corresponding to position 72 of SEQ ID NO: 1; and (e) an A residue at a position corresponding to position 73 of SEQ ID NO: 1.

[0073] In some embodiments, the second subunit comprises one or more of the following residues: (a) an H, K, L, or S residue at a position corresponding to position 48 of SEQ ID NO: 1; (b) an S, C, Q, E, or A residue at a position corresponding to position 50 of SEQ ID NO: 1; (c) an S, P, G, T, A, R, or N residue at a position corresponding to position 71 of SEQ ID NO: 1; (d) a T, R, K, or A residue at a position corresponding to position 72 of SEQ ID NO: 1; (e) an H, C, A, or S residue at a position corresponding to position 73 of SEQ ID NO: 1; and (f) an S, A, or T residue at a position corresponding to position 74 of SEQ ID NO: 1.

[0074] In some embodiments, the first subunit comprises residues corresponding to residues 48, 50, 71, 72, and 73 of any one of SEQ ID NOs: 138-156.

[0075] In some embodiments, the second subunit comprises residues corresponding to residues 239, 241, 262, 263, 264, and 265 of any one of SEQ ID NOs: 138-156.

[0076] In some embodiments, the first subunit comprises one or more of the following residues: (a) an A or G residue at a position corresponding to position 19 of SEQ ID NO: 1; (b) a Q or E residue at a position corresponding to position 80 of SEQ ID NO: 1; and (c) a K or R residue at a position corresponding to position 139 of SEQ ID NO: 1.

[0077] In some embodiments, the second subunit comprises one or more of the following residues: (a) an A or G residue at a position corresponding to position 19 of SEQ ID NO: 1; (b) a Q or E residue at a position corresponding to position 80 of SEQ ID NO: 1; (c) an H or Y residue at a position corresponding to position 85 of SEQ ID NO: 1; and (d) a K or R residue at a position corresponding to position 139 of SEQ ID NO: 1.

[0078] In some embodiments, the first subunit comprises residues corresponding to residues 19, 80, and 139 of any one of SEQ ID NOs: 138-156.

[0079] In some embodiments, the second subunit comprises residues corresponding to residues 19, 80, 85, and 139 of any one of SEQ ID NOs: 138-156.

[0080] Another aspect is a method for cleaving double-stranded DNA at a target site comprising a meganuclease recognition sequence recognition sequence comprising a center sequence consisting of ACGT, the method comprising contacting the double-stranded DNA having the target site with an engineered meganuclease described herein, wherein the engineered meganuclease binds and cleaves the recognition sequence.

[0081] In some embodiments, the center sequence consists of ATAA.

[0082] In some embodiments, the first subunit comprises one or more of the following residues: (a) a K, A, H, S, L, or Q residue at a position corresponding to position 48 of SEQ ID NO: 1; (b) a Q, T, R, I, G, K, D, C, or V residue at a position corresponding to position 50 of SEQ ID NO: 1; (c) a G, K, S, H, or N residue at a position corresponding to position 71 of SEQ ID NO: 1; (d) an R, A, G, Q, H, L, or S residue at a position corresponding to position 72 of SEQ ID NO: 1; (e) an A, T, or C residue at a position corresponding to position 73 of SEQ ID NO: 1; and (f) an S or A residue at a position corresponding to position 74 of SEQ ID NO: 1.

[0083] In some embodiments, the second subunit comprises one or more of the following residues: (a) an S, T, A, K, or N residue at a position corresponding to position 48 of SEQ ID NO: 1; (b) an R, K, E, A, C, or T residue at a position corresponding to position 50 of SEQ ID NO: 1; (c) an S, G, K, or R residue at a position corresponding to position 71 of SEQ ID NO: 1; (d) a T, R, Q, G, A, Y, S, N, or K residue at a position corresponding to position 72 of SEQ ID NO: 1; (e) an I, C, or V residue at a position corresponding to position 73 of SEQ ID NO: 1; and (f) an S, A, or T residue at a position corresponding to position 74 of SEQ ID NO: 1.

[0084] In some embodiments, the first subunit comprises residues corresponding to residues 48, 50, 71, 72, 73, and 74 of any one of SEQ ID NOs: 159-183.

[0085] In some embodiments, the second subunit comprises residues corresponding to residues 239, 241, 262, 263, 264, and 265 of any one of SEQ ID NOs: 159-183.

[0086] In some embodiments, the first subunit comprises one or more of the following residues: (a) an A, G, or S residue at a position corresponding to position 19 of SEQ ID NO: 1; (b) a Q or E residue at a position corresponding to position 80 of SEQ ID NO: 1; (c) a K or E residue at a position corresponding to position 100 of SEQ ID NO: 1; (d) a K or R residue at a position corresponding to position 139 of SEQ ID NO: 1; (e) an S or G residue at a position corresponding to position 154 of SEQ ID NO: 1; and (f) an S or A residue at a position corresponding to position 172 of SEQ ID NO: 1.

[0087] In some embodiments, the second subunit comprises one or more of the following residues: (a) a G, S, or A residue at a position corresponding to position 19 of SEQ ID NO: 1; (b) a V or A residue at a position corresponding to position 59 of SEQ ID NO: 1; (c) an L residue at a position corresponding to position 78 of SEQ ID NO: 1; (d) an S residue at a position corresponding to position 79 of SEQ ID NO: 1; (e) a Q or E residue at a position corresponding to position 80 of SEQ ID NO: 1; (f) an S or F residue at a position corresponding to position 118 of SEQ ID NO: 1; and (g) a K or R residue at a position corresponding to position 139 of SEQ ID NO: 1.

[0088] In some embodiments, the first subunit comprises residues corresponding to residues 19, 80, 100, 139, 154, and 172 of any one of SEQ ID NOs: 159-183.

[0089] In some embodiments, the second subunit comprises residues corresponding to residues 19, 59, 78, 79, 80, 118, and 139 of any one of SEQ ID NOs: 159-183.

[0090] Another aspect is a method for cleaving double-stranded DNA at a target site comprising a meganuclease recognition sequence recognition sequence comprising a center sequence consisting of ATAA, the method comprising contacting the double-stranded DNA having the target site with an engineered meganuclease described herein, wherein the engineered meganuclease binds and cleaves the recognition sequence.

[0091] In some embodiments, the center sequence consists of ATAG.

[0092] In some embodiments, the first subunit comprises one or more of the following residues: (a) a K or H residue at a position corresponding to position 48 of SEQ ID NO: 1; (b) an R residue at a position corresponding to position 50 of SEQ ID NO: 1; (c) a G, R, or H residue at a position corresponding to position 71 of SEQ ID NO: 1; (d) an R, G, S, A, P, or Q residue at a position corresponding to position 72 of SEQ ID NO: 1; and (e) an A or C residue at a position corresponding to position 73 of SEQ ID NO: 1.

[0093] In some embodiments, the second subunit comprises one or more of the following residues: (a) a C or R residue at a position corresponding to position 50 of SEQ ID NO: 1; (b) a G or S residue at a position corresponding to position 72 of SEQ ID NO: 1; and (c) an R residue at a position corresponding to position 73 of SEQ ID NO: 1.

[0094] In some embodiments, the first subunit comprises residues corresponding to residues 48, 50, 71, 72, and 73 of any one of SEQ ID NOs: 186-199.

[0095] In some embodiments, the second subunit comprises residues corresponding to residues 241, 263, and 264 of any one of SEQ ID NOs: 186-199.

[0096] In some embodiments, the first subunit comprises one or more of the following residues: (a) an A or G residue at a position corresponding to position 19 of SEQ ID NO: 1; (b) a Q or E residue at a position corresponding to position 80 of SEQ ID NO: 1; and (c) a K or R residue at a position corresponding to position 139 of SEQ ID NO: 1.

[0097] In some embodiments, the second subunit comprises one or more of the following residues: (a) a G or A residue at a position corresponding to position 19 of SEQ ID NO: 1; (b) a K or R residue at a position corresponding to position 36 of SEQ ID NO: 1; (c) a V or A residue at a position corresponding to position 59 of SEQ ID NO: 1; (d) a Q residue at a position corresponding to position 80 of SEQ ID NO: 1; and (e) a K or R residue at a position corresponding to position 139 of SEQ ID NO: 1.

[0098] In some embodiments, the first subunit comprises residues corresponding to residues 19, 80, and 139 of any one of SEQ ID NOs: 186-199.

[0099] In some embodiments, the second subunit comprises residues corresponding to residues 19, 36, 59, 80, and 139 of any one of SEQ ID NOs: 186-199.

[0100] Another aspect is a method for cleaving double-stranded DNA at a target site comprising a meganuclease recognition sequence recognition sequence comprising a center sequence consisting of ATAG, the method comprising contacting the double-stranded DNA having the target site with an engineered meganuclease described herein, wherein the engineered meganuclease binds and cleaves the recognition sequence.

[0101] In some embodiments, the center sequence consists of ATAT.

[0102] In some embodiments, the first subunit comprises one or more of the following residues: (a) a K, H, C, A, S, D, or T residue at a position corresponding to position 48 of SEQ ID NO: 1; (b) a Q, N, C, R, K, S, T, or V residue at a position corresponding to position 50 of SEQ ID NO: 1; (c) a G, H, or I residue at a position corresponding to position 71 of SEQ ID NO: 1; (d) an R, A, N, or Q residue at a position corresponding to position 72 of SEQ ID NO: 1; and (e) an A, C, or S residue at a position corresponding to position 73 of SEQ ID NO: 1.

[0103] In some embodiments, the second subunit comprises one or more of the following residues: (a) an H, K, A, S, R, or T residue at a position corresponding to position 48 of SEQ ID NO: 1; (b) an S, C, K, R, Q, or N residue at a position corresponding to position 50 of SEQ ID NO: 1; (c) an S, K, E, I, G, or R residue at a position corresponding to position 71 of SEQ ID NO: 1; (d) a T, A, R, S, K, G, or N residue at a position corresponding to position 72 of SEQ ID NO: 1; (e) an H, C, A, S, or G residue at a position corresponding to position 73 of SEQ ID NO: 1; and (f) an S, C, or A residue at a position corresponding to position 74 of SEQ ID NO: 1.

[0104] In some embodiments, the first subunit comprises residues corresponding to residues 48, 50, 71, 72, and 73 of any one of SEQ ID NOs: 202-219.

[0105] In some embodiments, the second subunit comprises residues corresponding to residues 239, 241, 262, 263, 264, and 265 of any one of SEQ ID NOs: 202-219.

[0106] In some embodiments, the first subunit comprises one or more of the following residues: (a) an A or G residue at a position corresponding to position 19 of SEQ ID NO: 1; (b) a Q or E residue at a position corresponding to position 80 of SEQ ID NO: 1; and (c) a K, R, or S residue at a position corresponding to position 139 of SEQ ID NO: 1.

[0107] In some embodiments, the second subunit comprises one or more of the following residues: (a) a G or A residue at a position corresponding to position 19 of SEQ ID NO: 1; (b) a V or A residue at a position corresponding to position 59 of SEQ ID NO: 1; (c) a Q, E, or K residue at a position corresponding to position 80 of SEQ ID NO: 1; and (d) a K, R, P, or N residue at a position corresponding to position 139 of SEQ ID NO: 1.

[0108] In some embodiments, the first subunit comprises residues corresponding to residues 19, 80, and 139 of any one of SEQ ID NOs: 202-219.

[0109] In some embodiments, the second subunit comprises residues corresponding to residues 19, 59, 80, and 139 of any one of SEQ ID NOs: 202-219.

[0110] Another aspect is a method for cleaving double-stranded DNA at a target site comprising a meganuclease recognition sequence recognition sequence comprising a center sequence consisting of ATAT, the method comprising contacting the double-stranded DNA having the target site with an engineered meganuclease described herein, wherein the engineered meganuclease binds and cleaves the recognition sequence.

[0111] In some embodiments, the center sequence consists of ATGA.

[0112] In some embodiments, the first subunit comprises one or more of the following residues: (a) a K, A, H, or L residue at a position corresponding to position 48 of SEQ ID NO: 1; (b) an R, T, E, S, C, or V residue at a position corresponding to position 50 of SEQ ID NO: 1; (c) an R, T, S, A, or K residue at a position corresponding to position 72 of SEQ ID NO: 1; and (d) an A or S residue at a position corresponding to position 73 of SEQ ID NO: 1.

[0113] In some embodiments, the second subunit comprises one or more of the following residues: (a) an H, K, R, A, or S residue at a position corresponding to position 48 of SEQ ID NO: 1; (b) an S, I, R, C, A, or Q residue at a position corresponding to position 50 of SEQ ID NO: 1; (c) an R or H residue at a position corresponding to position 72 of SEQ ID NO: 1; (d) an I or V residue at a position corresponding to position 73 of SEQ ID NO: 1; and (e) an S, A, or T residue at a position corresponding to position 74 of SEQ ID NO: 1.

[0114] In some embodiments, the first subunit comprises residues corresponding to residues 48, 50, 72, and 73 of any one of SEQ ID NOs: 222-243.

[0115] In some embodiments, the second subunit comprises residues corresponding to residues 239, 241, 263, 264, and 265 of any one of SEQ ID NOs: 222-243.

[0116] In some embodiments, the first subunit comprises one or more of the following residues: (a) an A, G, or S residue at a position corresponding to position 19 of SEQ ID NO: 1; (b) a Q or E residue at a position corresponding to position 80 of SEQ ID NO: 1; (c) an F or L residue at a position corresponding to position 87 of SEQ ID NO: 1; (d) a Q or R residue at a position corresponding to position 92 of SEQ ID NO: 1; and (e) a K or R residue at a position corresponding to position 139 of SEQ ID NO: 1.

[0117] In some embodiments, the second subunit comprises one or more of the following residues: (a) a G, A, or S residue at a position corresponding to position 19 of SEQ ID NO: 1; (b) a V or A residue at a position corresponding to position 59 of SEQ ID NO: 1; (c) a Q or E residue at a position corresponding to position 80 of SEQ ID NO: 1; and (d) a K or R residue at a position corresponding to position 139 of SEQ ID NO: 1.

[0118] In some embodiments, the first subunit comprises residues corresponding to residues 19, 80, 87, 92, and 139 of any one of SEQ ID NOs: 222-243.

[0119] In some embodiments, the second subunit comprises residues corresponding to residues 19, 59, 80, and 139 of any one of SEQ ID NOs: 222-243.

[0120] Another aspect is a method for cleaving double-stranded DNA at a target site comprising a meganuclease recognition sequence recognition sequence comprising a center sequence consisting of ATGA, the method comprising contacting the double-stranded DNA having the target site with an engineered meganuclease described herein, wherein the engineered meganuclease binds and cleaves the recognition sequence.

[0121] In some embodiments, the center sequence consists of ATGG.

[0122] In some embodiments, the first subunit comprises one or more of the following residues: (a) an R residue at a position corresponding to position 50 of SEQ ID NO: 1; (b) a G or S residue at a position corresponding to position 71 of SEQ ID NO: 1; (c) a P or G residue at a position corresponding to position 72 of SEQ ID NO: 1; and (d) an A or C residue at a position corresponding to position 73 of SEQ ID NO: 1; (e) an S or C residue at a position corresponding to position 74 of SEQ ID NO: 1.

[0123] In some embodiments, the second subunit comprises one or more of the following residues: (a) a R residue at a position corresponding to position 50 of SEQ ID NO: 1; (b) a D or G residue at a position corresponding to position 71 of SEQ ID NO: 1; (c) a G residue at a position corresponding to position 72 of SEQ ID NO: 1; and (d) an R residue at a position corresponding to position 73 of SEQ ID NO: 1.

[0124] In some embodiments, the first subunit comprises residues corresponding to residues 50, 71, 72, 73, and 74 of any one of SEQ ID NOs: 246-247.

[0125] In some embodiments, the second subunit comprises residues corresponding to residues 239, 241, 262, 263, and 264 of any one of SEQ ID NOs: 246-247.

[0126] In some embodiments, the first subunit comprises one or more of the following residues: (a) an A or G residue at a position corresponding to position 19 of SEQ ID NO: 1; (b) an E or Q residue at a position corresponding to position 80 of SEQ ID NO: 1; (c) an E or K residue at a position corresponding to position 82 of SEQ ID NO: 1; and (d) an R or K residue at a position corresponding to position 139 of SEQ ID NO: 1.

[0127] In some embodiments, the second subunit comprises one or more of the following residues: (a) an A or G residue at a position corresponding to position 19 of SEQ ID NO: 1; (b) a N residue at a position corresponding to position 77 of SEQ ID NO: 1; and (c) a Q or R residue at a position corresponding to position 80 of SEQ ID NO: 1.

[0128] In some embodiments, the first subunit comprises residues corresponding to residues 19, 80, 82, and 139 of any one of SEQ ID NOs: 246-247.

[0129] In some embodiments, the second subunit comprises residues corresponding to residues 19, 77, and 80 of any one of SEQ ID NOs: 246-247.

[0130] In some embodiments, the second subunit further comprises an R residue inserted between positions corresponding to positions 73 and 74 of SEQ ID NO: 1.

[0131] Another aspect is a method for cleaving double-stranded DNA at a target site comprising a meganuclease recognition sequence recognition sequence comprising a center sequence consisting of ATGG, the method comprising contacting the double-stranded DNA having the target site with an engineered meganuclease described herein, wherein the engineered meganuclease binds and cleaves the recognition sequence.

[0132] In some embodiments, the center sequence consists of TTGG.

[0133] In some embodiments, the first subunit comprises one or more of the following residues: (a) an R residue at a position corresponding to position 50 of SEQ ID NO: 1; (b) an S residue at a position corresponding to position 71 of SEQ ID NO: 1; (c) a G residue at a position corresponding to position 72 of SEQ ID NO: 1; and (d) an R residue at a position corresponding to position 73 of SEQ ID NO: 1.

[0134] In some embodiments, the second subunit comprises one or more of the following residues: (a) a K or S residue at a position corresponding to position 48 of SEQ ID NO: 1; (b) a C, T, E, K, or R residue at a position corresponding to position 50 of SEQ ID NO: 1; (c) a G or K residue at a position corresponding to position 71 of SEQ ID NO: 1; (d) a T, Q, K, R, H, A, or S residue at a position corresponding to position 72 of SEQ ID NO: 1; (e) an I or V residue at a position corresponding to position 73 of SEQ ID NO: 1; and (f) an S or A residue at a position corresponding to position 74 of SEQ ID NO: 1.

[0135] In some embodiments, the first subunit comprises residues corresponding to residues 50, 71, 72, and 73 of any one of SEQ ID NOs: 250-266.

[0136] In some embodiments, the second subunit comprises residues corresponding to residues 239, 241, 262, 263, 264, and 265 of any one of SEQ ID NOs: 250-266.

[0137] In some embodiments, the first subunit comprises one or more of the following residues: (a) an A or G residue at a position corresponding to position 19 of SEQ ID NO: 1; and (b) a Q residue at a position corresponding to position 80 of SEQ ID NO: 1.

[0138] In some embodiments, the second subunit comprises one or more of the following residues: (a) a G or A residue at a position corresponding to position 19 of SEQ ID NO: 1; (b) a Y or H residue at a position corresponding to position 66 of SEQ ID NO: 1; (c) a Q residue at a position corresponding to position 80 of SEQ ID NO: 1; (d) an H or R residue at a position corresponding to position 85 of SEQ ID NO: 1; and (e) a K or R residue at a position corresponding to position 139 of SEQ ID NO: 1.

[0139] In some embodiments, the first subunit comprises residues corresponding to residues 19 and 80 of any one of SEQ ID NOs: 250-266.

[0140] In some embodiments, the second subunit comprises residues corresponding to residues 19, 66, 80, 85, and 139 of any one of SEQ ID NOs: 250-266.

[0141] Another aspect is a method for cleaving double-stranded DNA at a target site comprising a meganuclease recognition sequence recognition sequence comprising a center sequence consisting of TTGG, the method comprising contacting the double-stranded DNA having the target site with an engineered meganuclease described herein, wherein the engineered meganuclease binds and cleaves the recognition sequence.

[0142] In some embodiments, the center sequence consists of GCAA.

[0143] In some embodiments, the first subunit comprises one or more of the following residues: (a) a K or H residue at a position corresponding to position 48 of SEQ ID NO: 1; (b) an R, C, K, T, or L residue at a position corresponding to position 50 of SEQ ID NO: 1; (c) a G, N, T, R, S, or H residue at a position corresponding to position 71 of SEQ ID NO: 1; (d) an R, P, S, N, Q, G, A, T, M, or V residue at a position corresponding to position 72 of SEQ ID NO: 1; (e) a T or V residue at a position corresponding to position 73 of SEQ ID NO: 1; and (f) an S, C, or A residue at a position corresponding to position 74 of SEQ ID NO: 1.

[0144] In some embodiments, the second subunit comprises one or more of the following residues: (a) an S, A, K, or T residue at a position corresponding to position 48 of SEQ ID NO: 1; (b) an R, C, T, K, or E residue at a position corresponding to position 50 of SEQ ID NO: 1; (c) a G, R, A, or H residue at a position corresponding to position 71 of SEQ ID NO: 1; (d) a T, G, S, A, E, N, K, H, R, C, or Y residue at a position corresponding to position 72 of SEQ ID NO: 1; (e) a C, V, or I residue at a position corresponding to position 73 of SEQ ID NO: 1; and (f) an S, A, or T residue at a position corresponding to position 74 of SEQ ID NO: 1.

[0145] In some embodiments, the first subunit comprises residues corresponding to residues 48, 50, 71, 72, 73, and 74 of any one of SEQ ID NOs: 269-291.

[0146] In some embodiments, the second subunit comprises residues corresponding to residues 239, 241, 262, 263, 264, and 265 of any one of SEQ ID NOs: 269-291.

[0147] In some embodiments, the first subunit comprises one or more of the following residues: (a) an A, G, or S residue at a position corresponding to position 19 of SEQ ID NO: 1; (b) a Q or E residue at a position corresponding to position 80 of SEQ ID NO: 1; and (c) a K or R residue at a position corresponding to position 139 of SEQ ID NO: 1.

[0148] In some embodiments, the second subunit comprises one or more of the following residues: (a) a G or A residue at a position corresponding to position 19 of SEQ ID NO: 1; (b) a Q or P residue at a position corresponding to position 31 of SEQ ID NO: 1; (c) a Q or E residue at a position corresponding to position 80 of SEQ ID NO: 1; and (d) a K or R residue at a position corresponding to position 139 of SEQ ID NO: 1.

[0149] In some embodiments, the first subunit comprises residues corresponding to residues 19, 80, and 139 of any one of SEQ ID NOs: 269-291.

[0150] In some embodiments, the second subunit comprises residues corresponding to residues 19, 31, 80, and 139 of any one of SEQ ID NOs: 269-291.

[0151] Another aspect is a method for cleaving double-stranded DNA at a target site comprising a meganuclease recognition sequence recognition sequence comprising a center sequence consisting of GCAA, the method comprising contacting the double-stranded DNA having the target site with an engineered meganuclease described herein, wherein the engineered meganuclease binds and cleaves the recognition sequence.

[0152] In some embodiments, the center sequence consists of GCAT.

[0153] In some embodiments, the first subunit comprises one or more of the following residues: (a) a K, A, H, or R residue at a position corresponding to position 48 of SEQ ID NO: 1; (b) a Q, V, R, K, or S residue at a position corresponding to position 50 of SEQ ID NO: 1; (c) a G, A, H, R, T, N, or S residue at a position corresponding to position 71 of SEQ ID NO: 1; (d) an R, T, G, S, Q, N, or A residue at a position corresponding to position 72 of SEQ ID NO: 1; (e) an A, T, V, or C residue at a position corresponding to position 73 of SEQ ID NO: 1; and (f) an S or A residue at a position corresponding to position 74 of SEQ ID NO: 1.

[0154] In some embodiments, the second subunit comprises one or more of the following residues: (a) an H, A, K, T, L, or I residue at a position corresponding to position 48 of SEQ ID NO: 1; (b) an S, R, K, Q, H, or V residue at a position corresponding to position 50 of SEQ ID NO: 1; (c) an S, K, R, A, G, T, H, or Y residue at a position corresponding to position 71 of SEQ ID NO: 1; (d) a T, A, G, N, S, R, H, Q, or K residue at a position corresponding to position 72 of SEQ ID NO: 1; (e) an H, C, G, S, or A residue at a position corresponding to position 73 of SEQ ID NO: 1; and (f) an S, C, or A residue at a position corresponding to position 74 of SEQ ID NO: 1.

[0155] In some embodiments, the first subunit comprises residues corresponding to residues 48, 50, 71, 72, 73, and 74 of any one of SEQ ID NOs: 294-313.

[0156] In some embodiments, the second subunit comprises residues corresponding to residues 239, 241, 262, 263, 264, and 265 of any one of SEQ ID NOs: 294-313.

[0157] In some embodiments, the first subunit comprises one or more of the following residues: (a) an A or G residue at a position corresponding to position 19 of SEQ ID NO: 1; (b) a Q or E residue at a position corresponding to position 80 of SEQ ID NO: 1; (c) a K, H, or R residue at a position corresponding to position 139 of SEQ ID NO: 1; and (d) a T or I residue at a position corresponding to position 143 of SEQ ID NO: 1.

[0158] In some embodiments, the second subunit comprises one or more of the following residues: (a) a G, S, or A residue at a position corresponding to position 19 of SEQ ID NO: 1; (b) a Q or E residue at a position corresponding to position 80 of SEQ ID NO: 1; (c) a V or A residue at a position corresponding to position 125 of SEQ ID NO: 1; and (d) a K, R, or H residue at a position corresponding to position 139 of SEQ ID NO: 1.

[0159] In some embodiments, the first subunit comprises residues corresponding to residues 19, 80, 139, and 143 of any one of SEQ ID NOs: 294-313.

[0160] In some embodiments, the second subunit comprises residues corresponding to residues 19, 80, 125, and 139 of any one of SEQ ID NOs: 294-313.

[0161] Another aspect is a method for cleaving double-stranded DNA at a target site comprising a meganuclease recognition sequence recognition sequence comprising a center sequence consisting of GCAT, the method comprising contacting the double-stranded DNA having the target site with an engineered meganuclease described herein, wherein the engineered meganuclease binds and cleaves the recognition sequence.

[0162] In some embodiments, the center sequence consists of GCGA.

[0163] In some embodiments, the first subunit comprises one or more of the following residues: (a) a K or R residue at a position corresponding to position 50 of SEQ ID NO: 1; (b) a G, R, S, A, or N residue at a position corresponding to position 71 of SEQ ID NO: 1; (c) an R, N, G, A, or Q residue at a position corresponding to position 72 of SEQ ID NO: 1; (d) a V, T, or I residue at a position corresponding to position 73 of SEQ ID NO: 1; and (e) an S or A residue at a position corresponding to position 74 of SEQ ID NO: 1.

[0164] In some embodiments, the second subunit comprises one or more of the following residues: (a) a K, T, S, A, or Q residue at a position corresponding to position 48 of SEQ ID NO: 1; (b) a C or R residue at a position corresponding to position 50 of SEQ ID NO: 1; (c) an R residue at a position corresponding to position 72 of SEQ ID NO: 1; (d) a V or I residue at a position corresponding to position 73 of SEQ ID NO: 1; and (e) an S or A residue at a position corresponding to position 74 of SEQ ID NO: 1.

[0165] In some embodiments, the first subunit comprises residues corresponding to residues 50, 71, 72, 73, and 74 of any one of SEQ ID NOs: 316-325.

[0166] In some embodiments, the second subunit comprises residues corresponding to residues 239, 241, 263, 264, and 265 of any one of SEQ ID NOs: 316-325.

[0167] In some embodiments, the first subunit comprises one or more of the following residues: (a) an A, G or S residue at a position corresponding to position 19 of SEQ ID NO: 1; and (b) a Q or E residue at a position corresponding to position 80 of SEQ ID NO: 1.

[0168] In some embodiments, the second subunit comprises one or more of the following residues: (a) a G, S, or A residue at a position corresponding to position 19 of SEQ ID NO: 1; (b) a Q or E residue at a position corresponding to position 80 of SEQ ID NO: 1; and (c) an R residue at a position corresponding to position 139 of SEQ ID NO: 1.

[0169] In some embodiments, the first subunit comprises residues corresponding to residues 19 and 80 of any one of SEQ ID NOs: 316-325.

[0170] In some embodiments, the second subunit comprises residues corresponding to residues 19, 80, and 139 of any one of SEQ ID NOs: 316-325.

[0171] Another aspect is a method for cleaving double-stranded DNA at a target site comprising a meganuclease recognition sequence recognition sequence comprising a center sequence consisting of GCGA, the method comprising contacting the double-stranded DNA having the target site with an engineered meganuclease described herein, wherein the engineered meganuclease binds and cleaves the recognition sequence.

[0172] In some embodiments, the center sequence consists of GCAG.

[0173] In some embodiments, the first subunit comprises one or more of the following residues: (a) a R residue at a position corresponding to position 50 of SEQ ID NO: 1; (b) a S residue at a position corresponding to position 71 of SEQ ID NO: 1; (c) an G residue at a position corresponding to position 72 of SEQ ID NO: 1; and (d) a R residue at a position corresponding to position 73 of SEQ ID NO: 1;

[0174] In some embodiments, the second subunit comprises one or more of the following residues: (a) a K or H residue at a position corresponding to position 48 of SEQ ID NO: 1; (b) a Q or R residue at a position corresponding to position 50 of SEQ ID NO: 1; (c) a S or R residue at a position corresponding to position 72 of SEQ ID NO: 1; (d) a V or T residue at a position corresponding to position 73 of SEQ ID NO: 1; and

[0175] In some embodiments, the first subunit comprises residues corresponding to residues 50, 71, 72, 73, and 74 of any one of SEQ ID NOs: 328-330.

[0176] In some embodiments, the second subunit comprises residues corresponding to residues 239, 241, 263, 264, and 265 of any one of SEQ ID NOs: 328-330.

[0177] In some embodiments, the second subunit comprises an E residue at a position corresponding to position 80 of SEQ ID NO: 1.

[0178] In some embodiments, the second subunit comprises residues corresponding to residues 80 of any one of SEQ ID NOs: 328-330.

[0179] Another aspect is a method for cleaving double-stranded DNA at a target site comprising a meganuclease recognition sequence recognition sequence comprising a center sequence consisting of GCAG, the method comprising contacting the double-stranded DNA having the target site with an engineered meganuclease described herein, wherein the engineered meganuclease binds and cleaves the recognition sequence.

[0180] In some embodiments, the center sequence consists of TCAA.

[0181] In some embodiments, the first subunit comprises one or more of the following residues: (a) a K or S residue at a position corresponding to position 48 of SEQ ID NO: 1; (b) an R, T, or C residue at a position corresponding to position 50 of SEQ ID NO: 1; (c) a G, R, or T residue at a position corresponding to position 71 of SEQ ID NO: 1; and (d) an R, S, P, T, or G residue at a position corresponding to position 72 of SEQ ID NO: 1.

[0182] In some embodiments, the second subunit comprises one or more of the following residues: (a) an S or K residue at a position corresponding to position 48 of SEQ ID NO: 1; (b) a K, R, C, or E residue at a position corresponding to position 50 of SEQ ID NO: 1; (c) an R, Q, N, or S residue at a position corresponding to position 72 of SEQ ID NO: 1; (d) an I residue at a position corresponding to position 73 of SEQ ID NO: 1; and (e) an S or A residue at a position corresponding to position 74 of SEQ ID NO: 1.

[0183] In some embodiments, the first subunit comprises residues corresponding to residues 48, 50, 71, and 72 of any one of SEQ ID NOs: 333-340.

[0184] In some embodiments, the second subunit comprises residues corresponding to residues 239, 241, 263, 264, and 265 of any one of SEQ ID NOs: 333-340.

[0185] In some embodiments, the first subunit comprises one or more of the following residues: (a) an A or S residue at a position corresponding to position 19 of SEQ ID NO: 1; (b) a Q or E residue at a position corresponding to position 80 of SEQ ID NO: 1; and (c) a K or R residue at a position corresponding to position 139 of SEQ ID NO: 1.

[0186] In some embodiments, the second subunit comprises one or more of the following residues: (a) a G or S residue at a position corresponding to position 19 of SEQ ID NO: 1; (b) a Q or E residue at a position corresponding to position 80 of SEQ ID NO: 1; and (c) an R residue at a position corresponding to position 139 of SEQ ID NO: 1.

[0187] In some embodiments, the first subunit comprises residues corresponding to residues 19, 80, and 139 of any one of SEQ ID NOs: 333-340.

[0188] In some embodiments, the second subunit comprises residues corresponding to residues 19, 80, and 139 of any one of SEQ ID NOs: 333-340.

[0189] Another aspect is a method for cleaving double-stranded DNA at a target site comprising a meganuclease recognition sequence recognition sequence comprising a center sequence consisting of TCAA, the method comprising contacting the double-stranded DNA having the target site with an engineered meganuclease described herein, wherein the engineered meganuclease binds and cleaves the recognition sequence.

[0190] In some embodiments, the center sequence consists of TTAA.

[0191] (a) a K, N, S, or R residue at a position corresponding to position 48 of SEQ ID NO: 1; (b) an R, V, K, or S residue at a position corresponding to position 50 of SEQ ID NO: 1; (c) a G, R, N, S, or A residue at a position corresponding to position 71 of SEQ ID NO: 1; (d) an R, T, S, N, D, Q, K, or A residue at a position corresponding to position 72 of SEQ ID NO: 1; and (e) an S or A residue at a position corresponding to position 74 of SEQ ID NO: 1.

[0192] In some embodiments, the second subunit comprises one or more of the following residues: (a) a K, S, A, or T residue at a position corresponding to position 48 of SEQ ID NO: 1; (b) a C, K, R, T, or E residue at a position corresponding to position 50 of SEQ ID NO: 1; (c) a T, K, R, A, S, or Q residue at a position corresponding to position 72 of SEQ ID NO: 1; (d) an I or V residue at a position corresponding to position 73 of SEQ ID NO: 1; and (e) an S or A residue at a position corresponding to position 74 of SEQ ID NO: 1.

[0193] In some embodiments, the first subunit comprises residues corresponding to residues 48, 50, 71, 72, and 74 of any one of SEQ ID NOs: 343-357.

[0194] In some embodiments, the second subunit comprises residues corresponding to residues 239, 241, 263, 264, and 265 of any one of SEQ ID NOs: 343-357.

[0195] In some embodiments, the first subunit comprises one or more of the following residues: (a) an A, G, or S residue at a position corresponding to position 19 of SEQ ID NO: 1; (b) a Q or E residue at a position corresponding to position 80 of SEQ ID NO: 1; and (c) a K or R residue at a position corresponding to position 139 of SEQ ID NO: 1.

[0196] In some embodiments, the second subunit comprises one or more of the following residues: (a) a G, A, or S residue at a position corresponding to position 19 of SEQ ID NO: 1; (b) a Y or H residue at a position corresponding to position 66 of SEQ ID NO: 1; (c) a Q residue at a position corresponding to position 80 of SEQ ID NO: 1; and (d) an R residue at a position corresponding to position 139 of SEQ ID NO: 1.

[0197] In some embodiments, the first subunit comprises residues corresponding to residues 19, 80, and 139 of any one of SEQ ID NOs: 343-357.

[0198] In some embodiments, the second subunit comprises residues corresponding to residues 19, 66, 80, and 139 of any one of SEQ ID NOs: 343-357.

[0199] Another aspect is a method for cleaving double-stranded DNA at a target site comprising a meganuclease recognition sequence recognition sequence comprising a center sequence consisting of TTAA, the method comprising contacting the double-stranded DNA having the target site with an engineered meganuclease described herein, wherein the engineered meganuclease binds and cleaves the recognition sequence.

[0200] Another aspect is a method for increasing the cleavage activity of an engineered meganuclease that binds and cleaves a recognition sequence comprising a center sequence consisting of ACAA, ACAG, ACAT, ACGA, ACGC, ACGG, ACGT, ATAA, ATAG, ATAT, ATGA, ATGG, TTGG, GCAA, GCAT, GCGA, GCAG, TCAA, or TTAA, wherein the engineered meganuclease comprises a first subunit and a second subunit, wherein the first subunit and the second subunit each comprise an amino acid sequence derived from SEQ ID NO: 1, the method comprising modifying each of the first subunit and the second subunit at one or more positions corresponding to positions 48, 50, 71, 72, 73, and 74 of SEQ ID NO: 1, wherein the modified nuclease has increased cleavage activity when compared to a control engineered meganuclease.

[0201] In some embodiments of the method, the center sequence consists of ACAA.

[0202] In some embodiments of the method, the modifying step comprises modifying the first subunit to comprise one or more of the following residues: (a) a K or L residue at a position corresponding to position 48 of SEQ ID NO: 1; (b) a C, R, T, K, or S residue at a position corresponding to position 50 of SEQ ID NO: 1; (c) a G or R residue at a position corresponding to position 71 of SEQ ID NO: 1; (d) an R or Q residue at a position corresponding to position 72 of SEQ ID NO: 1; and (e) an A or C residue at a position corresponding to position 73 of SEQ ID NO: 1.

[0203] In some embodiments of the method, the modifying step comprises modifying the second subunit to comprise one or more of the following residues: (a) a K, T, S, or A residue at a position corresponding to position 48 of SEQ ID NO: 1; (b) a C, R, E, K, or T residue at a position corresponding to position 50 of SEQ ID NO: 1; (c) a G or A residue at a position corresponding to position 71 of SEQ ID NO: 1; (d) a T, R, S, P, N, G, or A residue at a position corresponding to position 72 of SEQ ID NO: 1; (e) a V or I residue at a position corresponding to position 73 of SEQ ID NO: 1; and (f) an S, T, or A residue at a position corresponding to position 74 of SEQ ID NO: 1.

[0204] In some embodiments of the method, the first subunit is modified to comprise residues corresponding to residues 48, 50, 71, 72, and 73 of any one of SEQ ID NOs: 8-30.

[0205] In some embodiments of the method, the second subunit is modified to comprise residues corresponding to residues 239, 241, 262, 263, 264, and 265 of any one of SEQ ID NOs: 8-30.

[0206] In some embodiments of the method, the method further comprises modifying the first subunit to comprise one or more of the following residues: (a) an A or G residue at a position corresponding to position 19 of SEQ ID NO: 1; (b) a Q or E residue at a position corresponding to position 80 of SEQ ID NO: 1; (c) a K or R residue at a position corresponding to position 139 of SEQ ID NO: 1; and (d) an S or G residue at a position corresponding to position 154 of SEQ ID NO: 1.

[0207] In some embodiments of the method, the method further comprises modifying the second subunit to comprise one or more of the following residues: (a) a G, A, or S residue at a position corresponding to position 19 of SEQ ID NO: 1; (b) a Y or C residue at a position corresponding to position 66 of SEQ ID NO: 1; (c) a Q or E residue at a position corresponding to position 80 of SEQ ID NO: 1; (d) a Q or R residue at a position corresponding to position 92 of SEQ ID NO: 1; (e) an E or G residue at a position corresponding to position 117 of SEQ ID NO: 1; and (f) a K or R residue at a position corresponding to position 139 of SEQ ID NO: 1.

[0208] In some embodiments of the method, the first subunit is modified to comprise residues corresponding to residues 19, 80, 139, and 154 of any one of SEQ ID NOs: 8-30.

[0209] In some embodiments of the method, the second subunit is modified to comprise residues corresponding to residues 19, 66, 80, 92, 117, and 139 of any one of SEQ ID NOs: 8-30.

[0210] In some embodiments of the method, the center sequence consists of ACAG.

[0211] In some embodiments of the method, the modifying step comprises modifying the first subunit to comprise one or more of the following residues: (a) an R residue at a position corresponding to position 50 of SEQ ID NO: 1; (b) a G or R residue at a position corresponding to position 71 of SEQ ID NO: 1; (c) an R, K, Q, P, or T residue at a position corresponding to position 72 of SEQ ID NO: 1; (d) an A or C residue at a position corresponding to position 73 of SEQ ID NO: 1; and optionally (e) an R residue at a position following a position corresponding to position 73 of SEQ ID NO: 1.

[0212] In some embodiments of the method, the modifying step comprises modifying the second subunit to comprise one or more of the following residues: (a) a C residue at a position corresponding to position 50 of SEQ ID NO: 1; (b) a G, S, or D residue at a position corresponding to position 71 of SEQ ID NO: 1; (c) an R or G residue at a position corresponding to position 72 of SEQ ID NO: 1; and (d) an R residue at a position corresponding to position 73 of SEQ ID NO: 1.

[0213] In some embodiments of the method, the first subunit is modified to comprise residues corresponding to residues 50, 71, 72, and 73 of any one of SEQ ID NOs: 33-40.

[0214] In some embodiments of the method, the second subunit is modified to comprise residues corresponding to residues 241, 262, 263, and 264 of any one of SEQ ID NOs: 33-40.

[0215] In some embodiments of the method, the method further comprises modifying the first subunit to comprise one or more of the following residues: (a) an A or G residue at a position corresponding to position 19 of SEQ ID NO: 1; (b) a F, I, or L residue at a position corresponding to position 54 of SEQ ID NO: 1; (c) a Q or E residue at a position corresponding to position 80 of SEQ ID NO: 1; and (d) a S or P residue at a position corresponding to position 158 of SEQ ID NO: 1.

[0216] In some embodiments of the method, the method further comprises modifying the second subunit to comprise one or more of the following residues: (a) a G, A, or S residue at a position corresponding to position 19 of SEQ ID NO: 1; (b) a V or A residue at a position corresponding to position 59 of SEQ ID NO: 1; (c) a Y or H residue at a position corresponding to position 66 of SEQ ID NO: 1; (d) a Q residue at a position corresponding to position 80 of SEQ ID NO: 1; (e) an I or T residue at a position corresponding to position 81 of SEQ ID NO: 1; and (f) a K or R residue at a position corresponding to position 139 of SEQ ID NO: 1.

[0217] In some embodiments of the method, the first subunit is modified to comprise residues corresponding to residues 19, 54, 80, and 158 of any one of SEQ ID NOs: 33-40.

[0218] In some embodiments of the method, the second subunit is modified to comprise residues corresponding to residues 19, 59, 66, 80, 81, and 139 of any one of SEQ ID NOs: 33-40.

[0219] In some embodiments of the method, the second subunit is further modified by inserting an R residue between positions corresponding to positions 73 and 74 of SEQ ID NO: 1.

[0220] In some embodiments of the method, the center sequence consists of ACAT.

[0221] In some embodiments of the method, the modifying step comprises modifying the first subunit to comprise one or more of the following residues: (a) a K, S, I, L, or N residue at a position corresponding to position 48 of SEQ ID NO: 1; (b) a Q, S, R, or K residue at a position corresponding to position 50 of SEQ ID NO: 1; (c) a G or R residue at a position corresponding to position 71 of SEQ ID NO: 1; (d) an R or T residue at a position corresponding to position 72 of SEQ ID NO: 1; and (e) an A or G residue at a position corresponding to position 73 of SEQ ID NO: 1.

[0222] In some embodiments of the method, the modifying step comprises modifying the second subunit to comprise one or more of the following residues: (a) an H, T, G, A, S, L, or K residue at a position corresponding to position 48 of SEQ ID NO: 1; (b) an S, K, C, N R, G, or Q residue at a position corresponding to position 50 of SEQ ID NO: 1; (c) an S, G, R, T, K, or E residue at a position corresponding to position 71 of SEQ ID NO: 1; (d) a T, K, A, S, R, H, G, or N residue at a position corresponding to position 72 of SEQ ID NO: 1; (e) an H, A, C, S, G, or R residue at a position corresponding to position 73 of SEQ ID NO: 1; and (f) an S, C, or A residue at a position corresponding to position 74 of SEQ ID NO: 1.

[0223] In some embodiments of the method, the first subunit is modified to comprise residues corresponding to residues 48, 50, 71, 72, and 73 of any one of SEQ ID NOs: 43-64.

[0224] In some embodiments of the method, the second subunit is modified to comprise residues corresponding to residues 239, 241, 262, 263, 264, and 265 of any one of SEQ ID NOs: 43-64.

[0225] In some embodiments of the method, the method further comprises modifying the first subunit to comprise one or more of the following residues: (a) an A, G, or S residue at a position corresponding to position 19 of SEQ ID NO: 1; (b) an F or I residue at a position corresponding to position 54 of SEQ ID NO: 1; (c) a Q or E residue at a position corresponding to position 80 of SEQ ID NO: 1; and (d) a K, H, or R residue at a position corresponding to position 139 of SEQ ID NO: 1.

[0226] In some embodiments of the method, the method further comprises modifying the second subunit to comprise one or more of the following residues: (a) an A, G, or S residue at a position corresponding to position 19 of SEQ ID NO: 1; (b) a Q or E residue at a position corresponding to position 80 of SEQ ID NO: 1; (c) an I or T residue at a position corresponding to position 81 of SEQ ID NO: 1; (d) a P or H residue at a position corresponding to position 83 of SEQ ID NO: 1; (e) an E or G residue at a position corresponding to position 117 of SEQ ID NO: 1; and (f) a K, R, T, or H residue at a position corresponding to position 139 of SEQ ID NO: 1.

[0227] In some embodiments of the method, the first subunit is modified to comprise residues corresponding to residues 19, 54, 80, and 139 of any one of SEQ ID NOs: 43-64.

[0228] In some embodiments of the method, the second subunit is modified to comprise residues corresponding to residues 19, 80, 81, 83, 117, and 139 of any one of SEQ ID NOs: 43-64.

[0229] In some embodiments of the method, the center sequence consists of ACGA.

[0230] In some embodiments of the method, the modifying step comprises modifying the first subunit to comprise one or more of the following residues: (a) a K residue at a position corresponding to position 48 of SEQ ID NO: 1; (b) a V, R, T, W, or A residue at a position corresponding to position 50 of SEQ ID NO: 1; (c) a G or P residue at a position corresponding to position 71 of SEQ ID NO: 1; (d) an R or P residue at a position corresponding to position 72 of SEQ ID NO: 1; and (e) an A residue at a position corresponding to position 73 of SEQ ID NO: 1.

[0231] In some embodiments of the method, the modifying step comprises modifying the second subunit to comprise one or more of the following residues: (a) a K, H, T, A, G, or Q residue at a position corresponding to position 48 of SEQ ID NO: 1; (b) an R, S, C, I, V, or G residue at a position corresponding to position 50 of SEQ ID NO: 1; (c) a G residue at a position corresponding to position 71 of SEQ ID NO: 1; (d) an R or H residue at a position corresponding to position 72 of SEQ ID NO: 1; (e) an I or V residue at a position corresponding to position 73 of SEQ ID NO: 1; and (f) an S or A residue at a position corresponding to position 74 of SEQ ID NO: 1.

[0232] In some embodiments of the method, the first subunit is modified to comprise residues corresponding to residues 48, 50, 71, 72, and 73 of any one of SEQ ID NOs: 67-89.

[0233] In some embodiments of the method, the second subunit is modified to comprise residues corresponding to residues 239, 241, 262, 263, 264, and 265 of any one of SEQ ID NOs: 67-89.

[0234] In some embodiments of the method, the method further comprises modifying the first subunit to comprise one or more of the following residues: (a) an A, G, or S residue at a position corresponding to position 19 of SEQ ID NO: 1; (b) a Q or E residue at a position corresponding to position 80 of SEQ ID NO: 1; and (c) an R residue at a position corresponding to position 139 of SEQ ID NO: 1.

[0235] In some embodiments of the method, the method further comprises modifying the second subunit to comprise one or more of the following residues: (a) an A or G residue at a position corresponding to position 19 of SEQ ID NO: 1; (b) a Q or E residue at a position corresponding to position 80 of SEQ ID NO: 1; and (c) a K or R residue at a position corresponding to position 139 of SEQ ID NO: 1.

[0236] In some embodiments of the method, the first subunit is modified to comprise residues corresponding to residues 19, 80, and 139 of any one of SEQ ID NOs: 67-89.

[0237] In some embodiments of the method, the second subunit is modified to comprise residues corresponding to residues 19, 80, and 139 of any one of SEQ ID NOs: 67-89.

[0238] In some embodiments of the method, the center sequence consists of ACGC.

[0239] In some embodiments of the method, the modifying step comprises modifying the first subunit to comprise one or more of the following residues: (a) a K, H, Q, L, A, or S residue at a position corresponding to position 48 of SEQ ID NO: 1; (b) a Q, R, K, S, T, or C residue at a position corresponding to position 50 of SEQ ID NO: 1; (c) a G, R, or A residue at a position corresponding to position 71 of SEQ ID NO: 1; (d) an R, P, or H residue at a position corresponding to position 72 of SEQ ID NO: 1; and (e) an A residue at a position corresponding to position 73 of SEQ ID NO: 1.

[0240] In some embodiments of the method, the modifying step comprises modifying the second subunit to comprise one or more of the following residues: (a) an H, K, L, A, S, or N residue at a position corresponding to position 48 of SEQ ID NO: 1; (b) an S, E, K, I, N, or V residue at a position corresponding to position 50 of SEQ ID NO: 1; (c) an S, G, K, A, or R residue at a position corresponding to position 71 of SEQ ID NO: 1; (d) a T, R, A, S, H, or G residue at a position corresponding to position 72 of SEQ ID NO: 1; (e) an H, T, V, I, or C residue at a position corresponding to position 73 of SEQ ID NO: 1; and (f) an S, A, or T residue at a position corresponding to position 74 of SEQ ID NO: 1.

[0241] In some embodiments of the method, the first subunit is modified to comprise residues corresponding to residues 48, 50, 71, 72, and 73 of any one of SEQ ID NOs: 92-118.

[0242] In some embodiments of the method, the second subunit is modified to comprise residues corresponding to residues 239, 241, 262, 263, 264, and 265 of any one of SEQ ID NOs: 92-118.

[0243] In some embodiments of the method, the method further comprises modifying the first subunit to comprise one or more of the following residues: (a) an A, G, or S residue at a position corresponding to position 19 of SEQ ID NO: 1; and (b) a Q or E residue at a position corresponding to position 80 of SEQ ID NO: 1.

[0244] In some embodiments of the method, the method further comprises modifying the second subunit to comprise one or more of the following residues: (a) an A or G residue at a position corresponding to position 19 of SEQ ID NO: 1; (b) a Q or E residue at a position corresponding to position 80 of SEQ ID NO: 1; (c) an F or L residue at a position corresponding to position 87 of SEQ ID NO: 1; and (d) a K, R, N, H, or A residue at a position corresponding to position 139 of SEQ ID NO: 1.

[0245] In some embodiments of the method, the first subunit is modified to comprise residues corresponding to residues 19 and 80 of any one of SEQ ID NOs: 92-118.

[0246] In some embodiments of the method, the second subunit is modified to comprise residues corresponding to residues 19, 80, 87, and 139 of any one of SEQ ID NOs: 92-118.

[0247] In some embodiments of the method, the center sequence consists of ACGG.

[0248] In some embodiments of the method, the modifying step comprises modifying the first subunit to comprise one or more of the following residues: (a) an R or K residue at a position corresponding to position 50 of SEQ ID NO: 1; (b) an R residue at a position corresponding to position 72 of SEQ ID NO: 1; and (c) an A residue at a position corresponding to position 73 of SEQ ID NO: 1.

[0249] In some embodiments of the method, the modifying step comprises modifying the second subunit to comprise one or more of the following residues: (a) a K residue at a position corresponding to position 48 of SEQ ID NO: 1; (b) an R or P residue at a position corresponding to position 50 of SEQ ID NO: 1; (c) a D residue at a position corresponding to position 71 of SEQ ID NO: 1; (d) a G residue at a position corresponding to position 72 of SEQ ID NO: 1; and (e) an R or G residue at a position corresponding to position 73 of SEQ ID NO: 1.

[0250] In some embodiments of the method, the first subunit is modified to comprise residues corresponding to residues 50, 72, and 73 of any one of SEQ ID NOs: 121-135.

[0251] In some embodiments of the method, the second subunit is modified to comprise residues corresponding to residues 239, 241, 262, 263, and 264 of any one of SEQ ID NOs: 121-135.

[0252] In some embodiments of the method, the method further comprises modifying the first subunit to comprise one or more of the following residues: (a) an F or L residue at a position corresponding to position 54 of SEQ ID NO: 1; and (b) a Q residue at a position corresponding to position 80 of SEQ ID NO: 1.

[0253] In some embodiments of the method, the method further comprises modifying the second subunit to comprise one or more of the following residues: (a) an A residue at a position corresponding to position 19 of SEQ ID NO: 1; and (b) a Q residue at a position corresponding to position 80 of SEQ ID NO: 1.

[0254] In some embodiments of the method, the first subunit is modified to comprise residues corresponding to residues 54 and 80 of any one of SEQ ID NOs: 121-135.

[0255] In some embodiments of the method, the second subunit is modified to comprise residues corresponding to residues 19 and 80 of any one of SEQ ID NOs: 121-135.

[0256] In some embodiments of the method, the second subunit is further modified by inserting an R residue between positions corresponding to positions 73 and 74 of SEQ ID NO: 1.

[0257] In some embodiments of the method, the center sequence consists of ACGT.

[0258] In some embodiments of the method, the modifying step comprises modifying the first subunit to comprise one or more of the following residues: (a) a K, L, S, or H residue at a position corresponding to position 48 of SEQ ID NO: 1; (b) a Q, R, C, S, or V residue at a position corresponding to position 50 of SEQ ID NO: 1; (c) a G residue at a position corresponding to position 71 of SEQ ID NO: 1; (d) an R residue at a position corresponding to position 72 of SEQ ID NO: 1; and (e) an A residue at a position corresponding to position 73 of SEQ ID NO: 1.

[0259] In some embodiments of the method, the modifying step comprises modifying the second subunit to comprise one or more of the following residues: (a) an H, K, L, or S residue at a position corresponding to position 48 of SEQ ID NO: 1; (b) an S, C, Q, E, or A residue at a position corresponding to position 50 of SEQ ID NO: 1; (c) an S, P, G, T, A, R, or N residue at a position corresponding to position 71 of SEQ ID NO: 1; (d) a T, R, K, or A residue at a position corresponding to position 72 of SEQ ID NO: 1; (e) an H, C, A, or S residue at a position corresponding to position 73 of SEQ ID NO: 1; and (f) an S, A, or T residue at a position corresponding to position 74 of SEQ ID NO: 1.

[0260] In some embodiments of the method, the first subunit is modified to comprise residues corresponding to residues 48, 50, 71, 72, and 73 of any one of SEQ ID NOs: 138-156.

[0261] In some embodiments of the method, the second subunit is modified to comprise residues corresponding to residues 239, 241, 262, 263, 264, and 265 of any one of SEQ ID NOs: 138-156.

[0262] In some embodiments of the method, the method further comprises modifying the first subunit to comprise one or more of the following residues: (a) an A or G residue at a position corresponding to position 19 of SEQ ID NO: 1; (b) a Q or E residue at a position corresponding to position 80 of SEQ ID NO: 1; and (c) a K or R residue at a position corresponding to position 139 of SEQ ID NO: 1.

[0263] In some embodiments of the method, the method further comprises modifying the second subunit to comprise one or more of the following residues: (a) an A or G residue at a position corresponding to position 19 of SEQ ID NO: 1; (b) a Q or E residue at a position corresponding to position 80 of SEQ ID NO: 1; (c) an H or Y residue at a position corresponding to position 85 of SEQ ID NO: 1; and (d) a K or R residue at a position corresponding to position 139 of SEQ ID NO: 1.

[0264] In some embodiments of the method, the first subunit is modified to comprise residues corresponding to residues 19, 80, and 139 of any one of SEQ ID NOs: 138-156.

[0265] In some embodiments of the method, the second subunit is modified to comprise residues corresponding to residues 19, 80, 85, and 139 of any one of SEQ ID NOs: 138-156.

[0266] In some embodiments of the method, the center sequence consists of ATAA.

[0267] In some embodiments of the method, the modifying step comprises modifying the first subunit to comprise one or more of the following residues: (a) a K, A, H, S, L, or Q residue at a position corresponding to position 48 of SEQ ID NO: 1; (b) a Q, T, R, I, G, K, D, C, or V residue at a position corresponding to position 50 of SEQ ID NO: 1; (c) a G, K, S, H, or N residue at a position corresponding to position 71 of SEQ ID NO: 1; (d) an R, A, G, Q, H, L, or S residue at a position corresponding to position 72 of SEQ ID NO: 1; (e) an A, T, or C residue at a position corresponding to position 73 of SEQ ID NO: 1; and (f) an S or A residue at a position corresponding to position 74 of SEQ ID NO: 1.

[0268] In some embodiments of the method, the modifying step comprises modifying the second subunit to comprise one or more of the following residues: (a) an S, T, A, K, or N residue at a position corresponding to position 48 of SEQ ID NO: 1; (b) an R, K, E, A, C, or T residue at a position corresponding to position 50 of SEQ ID NO: 1; (c) an S, G, K, or R residue at a position corresponding to position 71 of SEQ ID NO: 1; (d) a T, R, Q, G, A, Y, S, N, or K residue at a position corresponding to position 72 of SEQ ID NO: 1; (e) an I, C, or V residue at a position corresponding to position 73 of SEQ ID NO: 1; and (f) an S, A, or T residue at a position corresponding to position 74 of SEQ ID NO: 1.

[0269] In some embodiments of the method, the first subunit is modified to comprise residues corresponding to residues 48, 50, 71, 72, 73, and 74 of any one of SEQ ID NOs: 159-183.

[0270] In some embodiments of the method, the second subunit is modified to comprise residues corresponding to residues 239, 241, 262, 263, 264, and 265 of any one of SEQ ID NOs: 159-183.

[0271] In some embodiments of the method, the method further comprises modifying the first subunit to comprise one or more of the following residues: (a) an A, G, or S residue at a position corresponding to position 19 of SEQ ID NO: 1; (b) a Q or E residue at a position corresponding to position 80 of SEQ ID NO: 1; (c) a K or E residue at a position corresponding to position 100 of SEQ ID NO: 1; (d) a K or R residue at a position corresponding to position 139 of SEQ ID NO: 1; (e) an S or G residue at a position corresponding to position 154 of SEQ ID NO: 1; and (f) an S or A residue at a position corresponding to position 172 of SEQ ID NO: 1.

[0272] In some embodiments of the method, the method further comprises modifying the second subunit to comprise one or more of the following residues: (a) a G, S, or A residue at a position corresponding to position 19 of SEQ ID NO: 1; (b) a V or A residue at a position corresponding to position 59 of SEQ ID NO: 1; (c) an L residue at a position corresponding to position 78 of SEQ ID NO: 1; (d) an S residue at a position corresponding to position 79 of SEQ ID NO: 1; (e) a Q or E residue at a position corresponding to position 80 of SEQ ID NO: 1; (f) an S or F residue at a position corresponding to position 118 of SEQ ID NO: 1; and (g) a K or R residue at a position corresponding to position 139 of SEQ ID NO: 1.

[0273] In some embodiments of the method, the first subunit is modified to comprise residues corresponding to residues 19, 80, 100, 139, 154, and 172 of any one of SEQ ID NOs: 159-183.

[0274] In some embodiments of the method, the second subunit is modified to comprise residues corresponding to residues 19, 59, 78, 79, 80, 118, and 139 of any one of SEQ ID NOs: 159-183.

[0275] In some embodiments of the method, the center sequence consists of ATAG.

[0276] In some embodiments of the method, the modifying step comprises modifying the first subunit to comprise one or more of the following residues: (a) a K or H residue at a position corresponding to position 48 of SEQ ID NO: 1; (b) an R residue at a position corresponding to position 50 of SEQ ID NO: 1; (c) a G, R, or H residue at a position corresponding to position 71 of SEQ ID NO: 1; (d) an R, G, S, A, P, or Q residue at a position corresponding to position 72 of SEQ ID NO: 1; and (e) an A or C residue at a position corresponding to position 73 of SEQ ID NO: 1.

[0277] In some embodiments of the method, the modifying step comprises modifying the second subunit to comprise one or more of the following residues: (a) a C or R residue at a position corresponding to position 50 of SEQ ID NO: 1; (b) a G or S residue at a position corresponding to position 72 of SEQ ID NO: 1; and (c) an R residue at a position corresponding to position 73 of SEQ ID NO: 1.

[0278] In some embodiments of the method, the first subunit is modified to comprise residues corresponding to residues 48, 50, 71, 72, and 73 of any one of SEQ ID NOs: 186-199.

[0279] In some embodiments of the method, the second subunit is modified to comprise residues corresponding to residues 241, 263, and 264 of any one of SEQ ID NOs: 186-199.

[0280] In some embodiments of the method, the method further comprises modifying the first subunit to comprise one or more of the following residues: (a) an A or G residue at a position corresponding to position 19 of SEQ ID NO: 1; (b) a Q or E residue at a position corresponding to position 80 of SEQ ID NO: 1; and (c) a K or R residue at a position corresponding to position 139 of SEQ ID NO: 1.

[0281] In some embodiments of the method, the method further comprises modifying the second subunit to comprise one or more of the following residues: (a) a G or A residue at a position corresponding to position 19 of SEQ ID NO: 1; (b) a K or R residue at a position corresponding to position 36 of SEQ ID NO: 1; (c) a V or A residue at a position corresponding to position 59 of SEQ ID NO: 1; (d) a Q residue at a position corresponding to position 80 of SEQ ID NO: 1; and (e) a K or R residue at a position corresponding to position 139 of SEQ ID NO: 1.

[0282] In some embodiments of the method, the first subunit is modified to comprise residues corresponding to residues 19, 80, and 139 of any one of SEQ ID NOs: 186-199.

[0283] In some embodiments of the method, the second subunit is modified to comprise residues corresponding to residues 19, 36, 59, 80, and 139 of any one of SEQ ID NOs: 186-199.

[0284] In some embodiments of the method, the center sequence consists of ATAT.

[0285] In some embodiments of the method, the modifying step comprises modifying the first subunit to comprise one or more of the following residues: (a) a K, H, C, A, S, D, or T residue at a position corresponding to position 48 of SEQ ID NO: 1; (b) a Q, N, C, R, K, S, T, or V residue at a position corresponding to position 50 of SEQ ID NO: 1; (c) a G, H, or I residue at a position corresponding to position 71 of SEQ ID NO: 1; (d) an R, A, N, or Q residue at a position corresponding to position 72 of SEQ ID NO: 1; and (e) an A, C, or S residue at a position corresponding to position 73 of SEQ ID NO: 1.

[0286] In some embodiments of the method, the modifying step comprises modifying the second subunit to comprise one or more of the following residues: (a) an H, K, A, S, R, or T residue at a position corresponding to position 48 of SEQ ID NO: 1; (b) an S, C, K, R, Q, or N residue at a position corresponding to position 50 of SEQ ID NO: 1; (c) an S, K, E, I, G, or R residue at a position corresponding to position 71 of SEQ ID NO: 1; (d) a T, A, R, S, K, G, or N residue at a position corresponding to position 72 of SEQ ID NO: 1; (e) an H, C, A, S, or G residue at a position corresponding to position 73 of SEQ ID NO: 1; and (f) an S, C, or A residue at a position corresponding to position 74 of SEQ ID NO: 1.

[0287] In some embodiments of the method, the first subunit is modified to comprise residues corresponding to residues 48, 50, 71, 72, and 73 of any one of SEQ ID NOs: 202-219.

[0288] In some embodiments of the method, the second subunit is modified to comprise residues corresponding to residues 239, 241, 262, 263, 264, and 265 of any one of SEQ ID NOs: 202-219.

[0289] In some embodiments of the method, the method further comprises modifying the first subunit to comprise one or more of the following residues: (a) an A or G residue at a position corresponding to position 19 of SEQ ID NO: 1; (b) a Q or E residue at a position corresponding to position 80 of SEQ ID NO: 1; and (c) a K, R, or S residue at a position corresponding to position 139 of SEQ ID NO: 1.

[0290] In some embodiments of the method, the method further comprises modifying the second subunit to comprise one or more of the following residues: (a) a G or A residue at a position corresponding to position 19 of SEQ ID NO: 1; (b) a V or A residue at a position corresponding to position 59 of SEQ ID NO: 1; (c) a Q, E, or K residue at a position corresponding to position 80 of SEQ ID NO: 1; and (d) a K, R, P, or N residue at a position corresponding to position 139 of SEQ ID NO: 1.

[0291] In some embodiments of the method, the first subunit is modified to comprise residues corresponding to residues 19, 80, and 139 of any one of SEQ ID NOs: 202-219.

[0292] In some embodiments of the method, the second subunit is modified to comprise residues corresponding to residues 19, 59, 80, and 139 of any one of SEQ ID NOs: 202-219.

[0293] In some embodiments of the method, the center sequence consists of ATGA.

[0294] In some embodiments of the method, the modifying step comprises modifying the first subunit to comprise one or more of the following residues: (a) a K, A, H, or L residue at a position corresponding to position 48 of SEQ ID NO: 1; (b) an R, T, E, S, C, or V residue at a position corresponding to position 50 of SEQ ID NO: 1; (c) an R, T, S, A, or K residue at a position corresponding to position 72 of SEQ ID NO: 1; and (d) an A or S residue at a position corresponding to position 73 of SEQ ID NO: 1.

[0295] In some embodiments of the method, the modifying step comprises modifying the second subunit to comprise one or more of the following residues: (a) an H, K, R, A, or S residue at a position corresponding to position 48 of SEQ ID NO: 1; (b) an S, I, R, C, A, or Q residue at a position corresponding to position 50 of SEQ ID NO: 1; (c) an R or H residue at a position corresponding to position 72 of SEQ ID NO: 1; (d) an I or V residue at a position corresponding to position 73 of SEQ ID NO: 1; and (e) an S, A, or T residue at a position corresponding to position 74 of SEQ ID NO: 1.

[0296] In some embodiments of the method, the first subunit is modified to comprise residues corresponding to residues 48, 50, 72, and 73 of any one of SEQ ID NOs: 222-243.

[0297] In some embodiments of the method, the second subunit is modified to comprise residues corresponding to residues 239, 241, 263, 264, and 265 of any one of SEQ ID NOs: 222-243.

[0298] In some embodiments of the method, the method further comprises modifying the first subunit to comprise one or more of the following residues: (a) an A, G, or S residue at a position corresponding to position 19 of SEQ ID NO: 1; (b) a Q or E residue at a position corresponding to position 80 of SEQ ID NO: 1; (c) an F or L residue at a position corresponding to position 87 of SEQ ID NO: 1; (d) a Q or R residue at a position corresponding to position 92 of SEQ ID NO: 1; and (e) a K or R residue at a position corresponding to position 139 of SEQ ID NO: 1.

[0299] In some embodiments of the method, the method further comprises modifying the second subunit to comprise one or more of the following residues: (a) a G, A, or S residue at a position corresponding to position 19 of SEQ ID NO: 1; (b) a V or A residue at a position corresponding to position 59 of SEQ ID NO: 1; (c) a Q or E residue at a position corresponding to position 80 of SEQ ID NO: 1; and (d) a K or R residue at a position corresponding to position 139 of SEQ ID NO: 1.

[0300] In some embodiments of the method, the first subunit is modified to comprise residues corresponding to residues 19, 80, 87, 92, and 139 of any one of SEQ ID NOs: 222-243.

[0301] In some embodiments of the method, the second subunit is modified to comprise residues corresponding to residues 19, 59, 80, and 139 of any one of SEQ ID NOs: 222-243.

[0302] In some embodiments of the method, the center sequence consists of ATGG.

[0303] In some embodiments of the method, the modifying step comprises modifying the first subunit to comprise one or more of the following residues: (a) a R residue at a position corresponding to position 50 of SEQ ID NO: 1; (b) a G or S residue at a position corresponding to position 71 of SEQ ID NO: 1; (c) a P or G residue at a position corresponding to position 72 of SEQ ID NO: 1; (d) an A or C residue at a position corresponding to position 73 of SEQ ID NO: 1; and (e) a S or C residue at a position corresponding to position 74 of SEQ ID NO: 1.

[0304] In some embodiments of the method, the modifying step comprises modifying the second subunit to comprise one or more of the following residues: (a) an R residue at a position corresponding to position 50 of SEQ ID NO: 1; (b) a D or G residue at a position corresponding to position 71 of SEQ ID NO: 1; (c) a G residue at a position corresponding to position 72 of SEQ ID NO: 1; and (d) a R residue at a position corresponding to position 73 of SEQ ID NO: 1.

[0305] In some embodiments of the method, the first subunit is modified to comprise residues corresponding to residues 50, 71, 72, and 73 of any one of SEQ ID NOs: 246-247.

[0306] In some embodiments of the method, the second subunit is modified to comprise residues corresponding to residues 241, 262, 263, and 264 of any one of SEQ ID NOs: 246-247.

[0307] In some embodiments of the method, the method further comprises modifying the first subunit to comprise one or more of the following residues: (a) an A or G residue at a position corresponding to position 19 of SEQ ID NO: 1; (b) an E or Q residue at a position corresponding to position 80 of SEQ ID NO: 1; (c) an E or K residue at a position corresponding to position 82 of SEQ ID NO: 1; and (d) a R or K residue at a position corresponding to position 139 of SEQ ID NO: 1.

[0308] In some embodiments of the method, the method further comprises modifying the second subunit to comprise one or more of the following residues: (a) an A or G residue at a position corresponding to position 19 of SEQ ID NO: 1; (b) a N residue at a position corresponding to position 77 of SEQ ID NO: 1; and (c) a Q or R residue at a position corresponding to position 80 of SEQ ID NO: 1.

[0309] In some embodiments of the method, the first subunit is modified to comprise residues corresponding to residues 19, 80, 82, and 139 of any one of SEQ ID NOs: 246-247.

[0310] In some embodiments of the method, the second subunit is modified to comprise residues corresponding to residues 19, 77, 80 of any one of SEQ ID NOs: 246-247.

[0311] In some embodiments of the method, the second subunit is further modified by inserting an R residue between positions corresponding to positions 73 and 74 of SEQ ID NO: 1.

[0312] In some embodiments of the method, the center sequence consists of TTGG.

[0313] In some embodiments of the method, the modifying step comprises modifying the first subunit to comprise one or more of the following residues: (a) an R residue at a position corresponding to position 50 of SEQ ID NO: 1; (b) an S residue at a position corresponding to position 71 of SEQ ID NO: 1; (c) a G residue at a position corresponding to position 72 of SEQ ID NO: 1; and (d) an R residue at a position corresponding to position 73 of SEQ ID NO: 1.

[0314] In some embodiments of the method, the modifying step comprises modifying the second subunit to comprise one or more of the following residues: (a) a K or S residue at a position corresponding to position 48 of SEQ ID NO: 1; (b) a C, T, E, K, or R residue at a position corresponding to position 50 of SEQ ID NO: 1; (c) a G or K residue at a position corresponding to position 71 of SEQ ID NO: 1; (d) a T, Q, K, R, H, A, or S residue at a position corresponding to position 72 of SEQ ID NO: 1; (e) an I or V residue at a position corresponding to position 73 of SEQ ID NO: 1; and (f) an S or A residue at a position corresponding to position 74 of SEQ ID NO: 1.

[0315] In some embodiments of the method, the first subunit is modified to comprise residues corresponding to residues 50, 71, 72, and 73 of any one of SEQ ID NOs: 250-266.

[0316] In some embodiments of the method, the second subunit is modified to comprise residues corresponding to residues 239, 241, 262, 263, 264, and 265 of any one of SEQ ID NOs: 250-266.

[0317] In some embodiments of the method, the method further comprises modifying the first subunit to comprise one or more of the following residues: (a) an A or G residue at a position corresponding to position 19 of SEQ ID NO: 1; and (b) a Q residue at a position corresponding to position 80 of SEQ ID NO: 1.

[0318] In some embodiments of the method, the method further comprises modifying the second subunit to comprise one or more of the following residues: (a) a G or A residue at a position corresponding to position 19 of SEQ ID NO: 1; (b) a Y or H residue at a position corresponding to position 66 of SEQ ID NO: 1; (c) a Q residue at a position corresponding to position 80 of SEQ ID NO: 1; (d) an H or R residue at a position corresponding to position 85 of SEQ ID NO: 1; and (e) a K or R residue at a position corresponding to position 139 of SEQ ID NO: 1.

[0319] In some embodiments of the method, the first subunit is modified to comprise residues corresponding to residues 19 and 80 of any one of SEQ ID NOs: 250-266.

[0320] In some embodiments of the method, the second subunit is modified to comprise residues corresponding to residues 19, 66, 80, 85, and 139 of any one of SEQ ID NOs: 250-266.

[0321] In some embodiments of the method, the center sequence consists of GCAA.

[0322] In some embodiments of the method, the modifying step comprises modifying the first subunit to comprise one or more of the following residues: (a) a K or H residue at a position corresponding to position 48 of SEQ ID NO: 1; (b) an R, C, K, T, or L residue at a position corresponding to position 50 of SEQ ID NO: 1; (c) a G, N, T, R, S, or H residue at a position corresponding to position 71 of SEQ ID NO: 1; (d) an R, P, S, N, Q, G, A, T, M, or V residue at a position corresponding to position 72 of SEQ ID NO: 1; (e) a T or V residue at a position corresponding to position 73 of SEQ ID NO: 1; and (f) an S, C, or A residue at a position corresponding to position 74 of SEQ ID NO: 1.

[0323] In some embodiments of the method, the modifying step comprises modifying the second subunit to comprise one or more of the following residues: (a) an S, A, K, or T residue at a position corresponding to position 48 of SEQ ID NO: 1; (b) an R, C, T, K, or E residue at a position corresponding to position 50 of SEQ ID NO: 1; (c) a G, R, A, or H residue at a position corresponding to position 71 of SEQ ID NO: 1; (d) a T, G, S, A, E, N, K, H, R, C, or Y residue at a position corresponding to position 72 of SEQ ID NO: 1; (e) a C, V, or I residue at a position corresponding to position 73 of SEQ ID NO: 1; and (f) an S, A, or T residue at a position corresponding to position 74 of SEQ ID NO: 1.

[0324] In some embodiments of the method, the first subunit is modified to comprise residues corresponding to residues 48, 50, 71, 72, 73, and 74 of any one of SEQ ID NOs: 269-291.

[0325] In some embodiments of the method, the second subunit is modified to comprise residues corresponding to residues 239, 241, 262, 263, 264, and 265 of any one of SEQ ID NOs: 269-291.

[0326] In some embodiments of the method, the method further comprises modifying the first subunit to comprise one or more of the following residues: (a) an A, G, or S residue at a position corresponding to position 19 of SEQ ID NO: 1; (b) a Q or E residue at a position corresponding to position 80 of SEQ ID NO: 1; and (c) a K or R residue at a position corresponding to position 139 of SEQ ID NO: 1.

[0327] In some embodiments of the method, the method further comprises modifying the second subunit to comprise one or more of the following residues: (a) a G or A residue at a position corresponding to position 19 of SEQ ID NO: 1; (b) a Q or P residue at a position corresponding to position 31 of SEQ ID NO: 1; (c) a Q or E residue at a position corresponding to position 80 of SEQ ID NO: 1; and (d) a K or R residue at a position corresponding to position 139 of SEQ ID NO: 1.

[0328] In some embodiments of the method, the first subunit is modified to comprise residues corresponding to residues 19, 80, and 139 of any one of SEQ ID NOs: 269-291.

[0329] In some embodiments of the method, the second subunit is modified to comprise residues corresponding to residues 19, 31, 80, and 139 of any one of SEQ ID NOs: 269-291.

[0330] In some embodiments of the method, the center sequence consists of GCAT.

[0331] In some embodiments of the method, the modifying step comprises modifying the first subunit to comprise one or more of the following residues: (a) a K, A, H, or R residue at a position corresponding to position 48 of SEQ ID NO: 1; (b) a Q, V, R, K, or S residue at a position corresponding to position 50 of SEQ ID NO: 1; (c) a G, A, H, R, T, N, or S residue at a position corresponding to position 71 of SEQ ID NO: 1; (d) an R, T, G, S, Q, N, or A residue at a position corresponding to position 72 of SEQ ID NO: 1; (e) an A, T, V, or C residue at a position corresponding to position 73 of SEQ ID NO: 1; and (f) an S or A residue at a position corresponding to position 74 of SEQ ID NO: 1.

[0332] In some embodiments of the method, the modifying step comprises modifying the second subunit to comprise one or more of the following residues: (a) an H, A, K, T, L, or I residue at a position corresponding to position 48 of SEQ ID NO: 1; (b) an S, R, K, Q, H, or V residue at a position corresponding to position 50 of SEQ ID NO: 1; (c) an S, K, R, A, G, T, H, or Y residue at a position corresponding to position 71 of SEQ ID NO: 1; (d) a T, A, G, N, S, R, H, Q, or K residue at a position corresponding to position 72 of SEQ ID NO: 1; (e) an H, C, G, S, or A residue at a position corresponding to position 73 of SEQ ID NO: 1; and (f) an S, C, or A residue at a position corresponding to position 74 of SEQ ID NO: 1.

[0333] In some embodiments of the method, the first subunit is modified to comprise residues corresponding to residues 48, 50, 71, 72, 73, and 74 of any one of SEQ ID NOs: 294-313.

[0334] In some embodiments of the method, the second subunit is modified to comprise residues corresponding to residues 239, 241, 262, 263, 264, and 265 of any one of SEQ ID NOs: 294-313.

[0335] In some embodiments of the method, the method further comprises modifying the first subunit to comprise one or more of the following residues: (a) an A or G residue at a position corresponding to position 19 of SEQ ID NO: 1; (b) a Q or E residue at a position corresponding to position 80 of SEQ ID NO: 1; (c) a K, H, or R residue at a position corresponding to position 139 of SEQ ID NO: 1; and (d) a T or I residue at a position corresponding to position 143 of SEQ ID NO: 1.

[0336] In some embodiments of the method, the method further comprises modifying the second subunit to comprise one or more of the following residues: (a) a G, S, or A residue at a position corresponding to position 19 of SEQ ID NO: 1; (b) a Q or E residue at a position corresponding to position 80 of SEQ ID NO: 1; (c) a V or A residue at a position corresponding to position 125 of SEQ ID NO: 1; and (d) a K, R, or H residue at a position corresponding to position 139 of SEQ ID NO: 1.

[0337] In some embodiments of the method, the first subunit is modified to comprise residues corresponding to residues 19, 80, 139, and 143 of any one of SEQ ID NOs: 294-313.

[0338] In some embodiments of the method, the second subunit is modified to comprise residues corresponding to residues 19, 80, 125, and 139 of any one of SEQ ID NOs: 294-313.

[0339] In some embodiments of the method, the center sequence consists of GCGA.

[0340] In some embodiments of the method, the modifying step comprises modifying the first subunit to comprise one or more of the following residues: (a) a K or R residue at a position corresponding to position 50 of SEQ ID NO: 1; (b) a G, R, S, A, or N residue at a position corresponding to position 71 of SEQ ID NO: 1; (c) an R, N, G, A, or Q residue at a position corresponding to position 72 of SEQ ID NO: 1; (d) a V, T, or I residue at a position corresponding to position 73 of SEQ ID NO: 1; and (e) an S or A residue at a position corresponding to position 74 of SEQ ID NO: 1.

[0341] In some embodiments of the method, the modifying step comprises modifying the second subunit to comprise one or more of the following residues: (a) a K, T, S, A, or Q residue at a position corresponding to position 48 of SEQ ID NO: 1; (b) a C or R residue at a position corresponding to position 50 of SEQ ID NO: 1; (c) an R residue at a position corresponding to position 72 of SEQ ID NO: 1; (d) a V or I residue at a position corresponding to position 73 of SEQ ID NO: 1; and (e) an S or A residue at a position corresponding to position 74 of SEQ ID NO: 1.

[0342] In some embodiments of the method, the first subunit is modified to comprise residues corresponding to residues 50, 71, 72, 73, and 74 of any one of SEQ ID NOs: 316-325.

[0343] In some embodiments of the method, the second subunit is modified to comprise residues corresponding to residues 239, 241, 263, 264, and 265 of any one of SEQ ID NOs: 316-325.

[0344] In some embodiments of the method, the method further comprises modifying the first subunit to comprise one or more of the following residues: (a) an A, G or S residue at a position corresponding to position 19 of SEQ ID NO: 1; and (b) a Q or E residue at a position corresponding to position 80 of SEQ ID NO: 1.

[0345] In some embodiments of the method, the method further comprises modifying the second subunit to comprise one or more of the following residues: (a) a G, S, or A residue at a position corresponding to position 19 of SEQ ID NO: 1; (b) a Q or E residue at a position corresponding to position 80 of SEQ ID NO: 1; and (c) an R residue at a position corresponding to position 139 of SEQ ID NO: 1.

[0346] In some embodiments of the method, the first subunit is modified to comprise residues corresponding to residues 19 and 80 of any one of SEQ ID NOs: 316-325.

[0347] In some embodiments of the method, the second subunit is modified to comprise residues corresponding to residues 19, 80, and 139 of any one of SEQ ID NOs: 316-325.

[0348] In some embodiments of the method, the center sequence consists of GCAG.

[0349] In some embodiments of the method, the modifying step comprises modifying the first subunit to comprise one or more of the following residues: (a) a R residue at a position corresponding to position 50 of SEQ ID NO: 1; (b) a S residue at a position corresponding to position 71 of SEQ ID NO: 1; (c) an G residue at a position corresponding to position 72 of SEQ ID NO: 1; (d) a R residue at a position corresponding to position 73 of SEQ ID NO: 1;

[0350] and

[0351] In some embodiments of the method, the modifying step comprises modifying the second subunit to comprise one or more of the following residues: (a) a K or H residue at a position corresponding to position 48 of SEQ ID NO: 1; (b) a Q or R residue at a position corresponding to position 50 of SEQ ID NO: 1; and (c) an S or R residue at a position corresponding to position 72 of SEQ ID NO: 1;

[0352] In some embodiments of the method, the first subunit is modified to comprise residues corresponding to residues 50, 71, 72, 73, and 74 of any one of SEQ ID NOs: 328-330.

[0353] In some embodiments of the method, the second subunit is modified to comprise residues corresponding to residues 239, 241, 263, 264, and 265 of any one of SEQ ID NOs: 328-330.

[0354] In some embodiments of the method, the method further comprises modifying the second subunit to comprise a Q or E residue at a position corresponding to position 80 of SEQ ID NO: 1.

[0355] In some embodiments of the method, the second subunit is modified to comprise residues corresponding to residues 80 of any one of SEQ ID NOs: 328-330.

[0356] In some embodiments of the method, the center sequence consists of TCAA.

[0357] In some embodiments of the method, the modifying step comprises modifying the first subunit to comprise one or more of the following residues: (a) a K or S residue at a position corresponding to position 48 of SEQ ID NO: 1; (b) an R, T, or C residue at a position corresponding to position 50 of SEQ ID NO: 1; (c) a G, R, or T residue at a position corresponding to position 71 of SEQ ID NO: 1; and (d) an R, S, P, T, or G residue at a position corresponding to position 72 of SEQ ID NO: 1.

[0358] In some embodiments of the method, the modifying step comprises modifying the second subunit to comprise one or more of the following residues: (a) an S or K residue at a position corresponding to position 48 of SEQ ID NO: 1; (b) a K, R, C, or E residue at a position corresponding to position 50 of SEQ ID NO: 1; (c) an R, Q, N, or S residue at a position corresponding to position 72 of SEQ ID NO: 1; (d) an I residue at a position corresponding to position 73 of SEQ ID NO: 1; and (e) an S or A residue at a position corresponding to position 74 of SEQ ID NO: 1.

[0359] In some embodiments of the method, the first subunit is modified to comprise residues corresponding to residues 48, 50, 71, and 72 of any one of SEQ ID NOs: 333-340.

[0360] In some embodiments of the method, the second subunit is modified to comprise residues corresponding to residues 239, 241, 263, 264, and 265 of any one of SEQ ID NOs: 333-340.

[0361] In some embodiments of the method, the method further comprises modifying the first subunit to comprise one or more of the following residues: (a) an A or S residue at a position corresponding to position 19 of SEQ ID NO: 1; (b) a Q or E residue at a position corresponding to position 80 of SEQ ID NO: 1; and (c) a K or R residue at a position corresponding to position 139 of SEQ ID NO: 1.

[0362] In some embodiments of the method, the method further comprises modifying the second subunit to comprise one or more of the following residues: (a) a G or S residue at a position corresponding to position 19 of SEQ ID NO: 1; (b) a Q or E residue at a position corresponding to position 80 of SEQ ID NO: 1; and (c) an R residue at a position corresponding to position 139 of SEQ ID NO: 1.

[0363] In some embodiments of the method, the first subunit is modified to comprise residues corresponding to residues 19, 80, and 139 of any one of SEQ ID NOs: 333-340.

[0364] In some embodiments of the method, the second subunit is modified to comprise residues corresponding to residues 19, 80, and 139 of any one of SEQ ID NOs: 333-340.

[0365] In some embodiments of the method, the center sequence consists of TTAA.

[0366] In some embodiments of the method, the modifying step comprises modifying the first subunit to comprise one or more of the following residues: (a) a K, N, S, or R residue at a position corresponding to position 48 of SEQ ID NO: 1; (b) an R, V, K, or S residue at a position corresponding to position 50 of SEQ ID NO: 1; (c) a G, R, N, S, or A residue at a position corresponding to position 71 of SEQ ID NO: 1; (d) an R, T, S, N, D, Q, K, or A residue at a position corresponding to position 72 of SEQ ID NO: 1; and (e) an S or A residue at a position corresponding to position 74 of SEQ ID NO: 1.

[0367] In some embodiments of the method, the modifying step comprises modifying the second subunit to comprise one or more of the following residues: (a) a K, S, A, or T residue at a position corresponding to position 48 of SEQ ID NO: 1; (b) a C, K, R, T, or E residue at a position corresponding to position 50 of SEQ ID NO: 1; (c) a T, K, R, A, S, or Q residue at a position corresponding to position 72 of SEQ ID NO: 1; (d) an I or V residue at a position corresponding to position 73 of SEQ ID NO: 1; and (e) an S or A residue at a position corresponding to position 74 of SEQ ID NO: 1.

[0368] In some embodiments of the method, the first subunit is modified to comprise residues corresponding to residues 48, 50, 71, 72, and 74 of any one of SEQ ID NOs: 343-357.

[0369] In some embodiments of the method, the second subunit is modified to comprise residues corresponding to residues 239, 241, 263, 264, and 265 of any one of SEQ ID NOs: 343-357.

[0370] In some embodiments of the method, the method further comprises modifying the first subunit to comprise one or more of the following residues: (a) an A, G, or S residue at a position corresponding to position 19 of SEQ ID NO: 1; (b) a Q or E residue at a position corresponding to position 80 of SEQ ID NO: 1; and (c) a K or R residue at a position corresponding to position 139 of SEQ ID NO: 1.

[0371] In some embodiments of the method, the method further comprises modifying the second subunit to comprise one or more of the following residues: (a) a G, A, or S residue at a position corresponding to position 19 of SEQ ID NO: 1; (b) a Y or H residue at a position corresponding to position 66 of SEQ ID NO: 1; (c) a Q residue at a position corresponding to position 80 of SEQ ID NO: 1; and (d) an R residue at a position corresponding to position 139 of SEQ ID NO: 1.

[0372] In some embodiments of the method, the first subunit is modified to comprise residues corresponding to residues 19, 80, and 139 of any one of SEQ ID NOs: 343-357.

[0373] In some embodiments of the method, the second subunit is modified to comprise residues corresponding to residues 19, 66, 80, and 139 of any one of SEQ ID NOs: 343-357.

[0374] Another aspect is an engineered meganuclease that binds and cleaves a recognition sequence comprising a center sequence consisting of GTAA, GTAG, GTAT, GTGA, GTGC, GTGG, or GTGT, wherein said engineered meganuclease comprises a first subunit and a second subunit, wherein said first subunit comprises an amino acid sequence derived from SEQ ID NO: 1, and wherein said first subunit comprises a substitution at one or more positions corresponding to positions 48, 50, 71, 72, 73, and 74 of SEQ ID NO: 1.

[0375] In some embodiments, the center sequence consists of GTAA.

[0376] In some embodiments, the first subunit comprises one or more of the following residues: (a) a K, S, A, R, N, or T residue at a position corresponding to position 48 of SEQ ID NO: 1; (b) a T, R, A, K, or C residue at a position corresponding to position 50 of SEQ ID NO: 1; (c) a G, R, S, T, A, N, H, or K residue at a position corresponding to position 71 of SEQ ID NO: 1; (d) an R, S, C, N, K, A, H, G, T, D, Y, P, or Q residue at a position corresponding to position 72 of SEQ ID NO: 1; (e) a V, C, I, or T residue at a position corresponding to position 73 of SEQ ID NO: 1; and (f) an S, A, or T residue at a position corresponding to position 74 of SEQ ID NO: 1.

[0377] In some embodiments, the first subunit comprises residues corresponding to residues 48, 50, 71, 72, 73, and 74 of any one of SEQ ID NOs: 360-389.

[0378] In some embodiments, the first subunit comprises one or more of the following residues: (a) an A or S residue at a position corresponding to position 19 of SEQ ID NO: 1; (b) a Q or E residue at a position corresponding to position 80 of SEQ ID NO: 1; and (c) a K or R residue at a position corresponding to position 139 of SEQ ID NO: 1.

[0379] In some embodiments, the first subunit comprises residues corresponding to residues 19, 80, and 139 of any one of SEQ ID NOs: 360-389.

[0380] Another aspect is a method for cleaving double-stranded DNA at a target site comprising a meganuclease recognition sequence recognition sequence comprising a center sequence consisting of GTAA, the method comprising contacting the double-stranded DNA having the target site with an engineered meganuclease described herein, wherein the engineered meganuclease binds and cleaves the recognition sequence.

[0381] In some embodiments, the center sequence consists of GTAG.

[0382] In some embodiments, the first subunit comprises one or more of the following residues: (a) an R or C residue at a position corresponding to position 50 of SEQ ID NO: 1; (b) an S or D residue at a position corresponding to position 71 of SEQ ID NO: 1; (c) a G or N residue at a position corresponding to position 72 of SEQ ID NO: 1; and (d) an R residue at a position corresponding to position 73 of SEQ ID NO: 1.

[0383] In some embodiments, the first subunit comprises residues corresponding to residues 50, 71, 72, and 73 of any one of SEQ ID NOs: 392-399.

[0384] In some embodiments, the first subunit comprises one or more of the following residues: (a) an A or S residue at a position corresponding to position 19 of SEQ ID NO: 1; (b) a Q residue at a position corresponding to position 80 of SEQ ID NO: 1; and (c) a K or R residue at a position corresponding to position 139 of SEQ ID NO: 1.

[0385] In some embodiments, the first subunit comprises residues corresponding to residues 19, 80, and 139 of any one of SEQ ID NOs: 392-399.

[0386] Another aspect is a method for cleaving double-stranded DNA at a target site comprising a meganuclease recognition sequence recognition sequence comprising a center sequence consisting of GTAG, the method comprising contacting the double-stranded DNA having the target site with an engineered meganuclease described herein, wherein the engineered meganuclease binds and cleaves the recognition sequence.

[0387] In some embodiments, the center sequence consists of GTAT.

[0388] In some embodiments, the first subunit comprises one or more of the following residues: (a) a K, G, T, A, M, H, S, L, or R residue at a position corresponding to position 48 of SEQ ID NO: 1; (b) a Q, V, R, S, T, G, K, C, or L residue at a position corresponding to position 50 of SEQ ID NO: 1; (c) a G, T, A, K, H, R, Y, L, S, or N residue at a position corresponding to position 71 of SEQ ID NO: 1; (d) an R, K, S, Y, N, T, G, W, H, or A residue at a position corresponding to position 72 of SEQ ID NO: 1; (e) an A, C, S, or T residue at a position corresponding to position 73 of SEQ ID NO: 1; and (f) an S, A, or C residue at a position corresponding to position 74 of SEQ ID NO: 1.

[0389] In some embodiments, the first subunit comprises residues corresponding to residues 48, 50, 71, 72, 73, and 74 of any one of SEQ ID NOs: 402-433.

[0390] In some embodiments, the first subunit comprises one or more of the following residues: (a) an A or S residue at a position corresponding to position 19 of SEQ ID NO: 1; (b) a Q or E residue at a position corresponding to position 80 of SEQ ID NO: 1; and (c) a K, R, T, or H residue at a position corresponding to position 139 of SEQ ID NO: 1.

[0391] In some embodiments, the first subunit comprises residues corresponding to residues 19, 80, and 139 of any one of SEQ ID NOs: 402-433.

[0392] Another aspect is a method for cleaving double-stranded DNA at a target site comprising a meganuclease recognition sequence recognition sequence comprising a center sequence consisting of GTAT, the method comprising contacting the double-stranded DNA having the target site with an engineered meganuclease described herein, wherein the engineered meganuclease binds and cleaves the recognition sequence.

[0393] In some embodiments, the center sequence consists of GTGA.

[0394] In some embodiments, the first subunit comprises one or more of the following residues: (a) a K, A, G, R, S, or H residue at a position corresponding to position 48 of SEQ ID NO: 1; (b) an R, V, C, or S residue at a position corresponding to position 50 of SEQ ID NO: 1; (c) a G, R, V, S, A, T, N, D, or H residue at a position corresponding to position 71 of SEQ ID NO: 1; (d) an R, T, S, G, H, K, or Y residue at a position corresponding to position 72 of SEQ ID NO: 1; (e) an A, V, or T residue at a position corresponding to position 73 of SEQ ID NO: 1; and (f) an S, T, A, or G residue at a position corresponding to position 74 of SEQ ID NO: 1.

[0395] In some embodiments, the first subunit comprises residues corresponding to residues 48, 50, 71, 72, 73, and 74 of any one of SEQ ID NOs: 436-462.

[0396] In some embodiments, the first subunit comprises one or more of the following residues: (a) an A or S residue at a position corresponding to position 19 of SEQ ID NO: 1; (b) a Q or E residue at a position corresponding to position 80 of SEQ ID NO: 1; and (c) a K or R residue at a position corresponding to position 139 of SEQ ID NO: 1.

[0397] In some embodiments, the first subunit comprises residues corresponding to residues 19, 80, and 139 of any one of SEQ ID NOs: 436-462.

[0398] Another aspect is a method for cleaving double-stranded DNA at a target site comprising a meganuclease recognition sequence recognition sequence comprising a center sequence consisting of GTGA, the method comprising contacting the double-stranded DNA having the target site with an engineered meganuclease described herein, wherein the engineered meganuclease binds and cleaves the recognition sequence.

[0399] In some embodiments, the center sequence consists of GTGC.

[0400] In some embodiments, the first subunit comprises one or more of the following residues: (a) a K, L, H, A, R, N, or S residue at a position corresponding to position 48 of SEQ ID NO: 1; (b) an R, S, V, K, I, or G residue at a position corresponding to position 50 of SEQ ID NO: 1; (c) a G, S, N, I, R, A, E, Q, Y, T, K, F, or V residue at a position corresponding to position 71 of SEQ ID NO: 1; (d) an R, K, G, H, P, S, C, N, T, A, M, D, or Q residue at a position corresponding to position 72 of SEQ ID NO: 1; (e) an A, V, T, N, C, or L residue at a position corresponding to position 73 of SEQ ID NO: 1; and (f) an S, A, or T residue at a position corresponding to position 74 of SEQ ID NO: 1.

[0401] In some embodiments, the first subunit comprises residues corresponding to residues 48, 50, 71, 72, 73, and 74 of any one of SEQ ID NOs: 465-495.

[0402] In some embodiments, the first subunit comprises one or more of the following residues: (a) an A or S residue at a position corresponding to position 19 of SEQ ID NO: 1; (b) a Q or E residue at a position corresponding to position 80 of SEQ ID NO: 1; and (c) a K, T, S, R, H, or V residue at a position corresponding to position 139 of SEQ ID NO: 1.

[0403] In some embodiments, the first subunit comprises residues corresponding to residues 19, 80, and 139 of any one of SEQ ID NOs: 465-495.

[0404] Another aspect is a method for cleaving double-stranded DNA at a target site comprising a meganuclease recognition sequence recognition sequence comprising a center sequence consisting of GTGC, the method comprising contacting the double-stranded DNA having the target site with an engineered meganuclease described herein, wherein the engineered meganuclease binds and cleaves the recognition sequence.

[0405] In some embodiments, the center sequence consists of GTGG.

[0406] In some embodiments, the first subunit comprises one or more of the following residues: (a) an R residue at a position corresponding to position 50 of SEQ ID NO: 1; (b) an S residue at a position corresponding to position 71 of SEQ ID NO: 1; (c) a G residue at a position corresponding to position 72 of SEQ ID NO: 1; and (d) an R residue at a position corresponding to position 73 of SEQ ID NO: 1.

[0407] In some embodiments, the first subunit comprises residues corresponding to residues 50, 71, 72, and 73 of SEQ ID NO: 498-501.

[0408] In some embodiments, the first subunit comprises one or more of the following residues: (a) an A residue at a position corresponding to position 19 of SEQ ID NO: 1; (b) an I residue at a position corresponding to position 62 of SEQ ID NO: 1; and (c) a Q residue at a position corresponding to position 80 of SEQ ID NO: 1.

[0409] In some embodiments, the first subunit comprises residues corresponding to residues 19, 62, and 80 of SEQ ID NO: 498-501.

[0410] Another aspect is a method for cleaving double-stranded DNA at a target site comprising a meganuclease recognition sequence recognition sequence comprising a center sequence consisting of GTGG, the method comprising contacting the double-stranded DNA having the target site with an engineered meganuclease described herein, wherein the engineered meganuclease binds and cleaves the recognition sequence.

[0411] In some embodiments, the center sequence consists of GTGT.

[0412] In some embodiments, the first subunit comprises one or more of the following residues: (a) a K, S, L, V, G, R, or N residue at a position corresponding to position 48 of SEQ ID NO: 1; (b) a Q, V, R, S, K, A, E, or C residue at a position corresponding to position 50 of SEQ ID NO: 1; (c) a G, R, N, H, A, or T residue at a position corresponding to position 71 of SEQ ID NO: 1; (d) an R, P, A, Q, K, T, G, or V residue at a position corresponding to position 72 of SEQ ID NO: 1; (e) an A, S, C, or T residue at a position corresponding to position 73 of SEQ ID NO: 1; and (f) an S, A, or T residue at a position corresponding to position 74 of SEQ ID NO: 1.

[0413] In some embodiments, the first subunit comprises residues corresponding to residues 48, 50, 71, 72, 73, and 74 of any one of SEQ ID NOs: 504-529.

[0414] In some embodiments, the first subunit comprises one or more of the following residues: (a) an A or S residue at a position corresponding to position 19 of SEQ ID NO: 1; (b) a Q or E residue at a position corresponding to position 80 of SEQ ID NO: 1; and (c) a K or R residue at a position corresponding to position 139 of SEQ ID NO: 1.

[0415] In some embodiments, the first subunit comprises residues corresponding to residues 19, 80, and 139 of any one of SEQ ID NOs: 504-529

[0416] Another aspect is a method for cleaving double-stranded DNA at a target site comprising a meganuclease recognition sequence recognition sequence comprising a center sequence consisting of GTGT, the method comprising contacting the double-stranded DNA having the target site with an engineered meganuclease described herein, wherein the engineered meganuclease binds and cleaves the recognition sequence.

[0417] Another aspect is a method for increasing the cleavage activity of an engineered meganuclease that binds and cleaves a recognition sequence comprising a center sequence consisting of GTAA, GTAG, GTAT, GTGA, GTGC, GTGG, or GTGT, wherein said engineered meganuclease comprises a first subunit and a second subunit, wherein said first subunit comprises an amino acid sequence derived from SEQ ID NO: 1, said method comprising modifying said first subunit at one or more positions corresponding to positions 48, 50, 71, 72, 73, and 74 of SEQ ID NO: 1, wherein said modified nuclease has increased cleavage activity when compared to a control engineered meganuclease.

[0418] In some embodiments of the method, the center sequence consists of GTAA.

[0419] In some embodiments of the method, the modifying step comprises modifying the first subunit to comprise one or more of the following residues: (a) a K, S, A, R, N, or T residue at a position corresponding to position 48 of SEQ ID NO: 1; (b) a T, R, A, K, or C residue at a position corresponding to position 50 of SEQ ID NO: 1; (c) a G, R, S, T, A, N, H, or K residue at a position corresponding to position 71 of SEQ ID NO: 1; (d) an R, S, C, N, K, A, H, G, T, D, Y, P, or Q residue at a position corresponding to position 72 of SEQ ID NO: 1; (e) a V, C, I, or T residue at a position corresponding to position 73 of SEQ ID NO: 1; and (f) an S, A, or T residue at a position corresponding to position 74 of SEQ ID NO: 1.

[0420] In some embodiments of the method, the first subunit is modified to comprise residues corresponding to residues 48, 50, 71, 72, 73, and 74 of any one of SEQ ID NOs: 360-389.

[0421] In some embodiments of the method, the method further comprises modifying the first subunit to comprise one or more of the following residues: (a) an A or S residue at a position corresponding to position 19 of SEQ ID NO: 1; (b) a Q or E residue at a position corresponding to position 80 of SEQ ID NO: 1; and (c) a K or R residue at a position corresponding to position 139 of SEQ ID NO: 1.

[0422] In some embodiments of the method, the method further comprises modifying the second subunit to comprise one or more of the following residues: (a) an A or S residue at a position corresponding to position 19 of SEQ ID NO: 1; (b) a Q or E residue at a position corresponding to position 80 of SEQ ID NO: 1; and (c) a K or R residue at a position corresponding to position 139 of SEQ ID NO: 1.

[0423] In some embodiments of the method, the center sequence consists of GTAG.

[0424] In some embodiments of the method, the modifying step comprises modifying the first subunit to comprise one or more of the following residues: (a) an R or C residue at a position corresponding to position 50 of SEQ ID NO: 1; (b) an S or D residue at a position corresponding to position 71 of SEQ ID NO: 1; (c) a G or N residue at a position corresponding to position 72 of SEQ ID NO: 1; and (d) an R residue at a position corresponding to position 73 of SEQ ID NO: 1.

[0425] In some embodiments of the method, the first subunit is modified to comprise residues corresponding to residues 50, 71, 72, and 73 of any one of SEQ ID NOs: 392-399.

[0426] In some embodiments of the method, the method further comprises modifying the first subunit to comprise one or more of the following residues: (a) an A or S residue at a position corresponding to position 19 of SEQ ID NO: 1; (b) a Q residue at a position corresponding to position 80 of SEQ ID NO: 1; and (c) a K or R residue at a position corresponding to position 139 of SEQ ID NO: 1.

[0427] In some embodiments of the method, the first subunit is modified to comprise residues corresponding to residues 19, 80, and 139 of any one of SEQ ID NOs: 392-399.

[0428] In some embodiments of the method, the first subunit is modified to comprise residues corresponding to residues 19, 80, and 139 of any one of SEQ ID NOs: 360-389.

[0429] In some embodiments of the method, the center sequence consists of GTAT.

[0430] In some embodiments of the method, the modifying step comprises modifying the first subunit to comprise one or more of the following residues: (a) a K, G, T, A, M, H, S, L, or R residue at a position corresponding to position 48 of SEQ ID NO: 1; (b) a Q, V, R, S, T, G, K, C, or L residue at a position corresponding to position 50 of SEQ ID NO: 1; (c) a G, T, A, K, H, R, Y, L, S, or N residue at a position corresponding to position 71 of SEQ ID NO: 1; (d) an R, K, S, Y, N, T, G, W, H, A residue at a position corresponding to position 72 of SEQ ID NO: 1; (e) an A, C, S, or T residue at a position corresponding to position 73 of SEQ ID NO: 1; and (f) an S, A, or C residue at a position corresponding to position 74 of SEQ ID NO: 1.

[0431] In some embodiments of the method, the first subunit is modified to comprise residues corresponding to residues 48, 50, 71, 72, 73, and 74 of any one of SEQ ID NOs: 402-433.

[0432] In some embodiments of the method, the method further comprises modifying the first subunit to comprise one or more of the following residues: (a) an A or S residue at a position corresponding to position 19 of SEQ ID NO: 1; (b) a Q or E residue at a position corresponding to position 80 of SEQ ID NO: 1; and (c) a K, R, T, or H residue at a position corresponding to position 139 of SEQ ID NO: 1.

[0433] In some embodiments of the method, the first subunit is modified to comprise residues corresponding to residues 19, 80, and 139 of any one of SEQ ID NOs: 402-433.

[0434] In some embodiments of the method, the center sequence consists of GTGA.

[0435] In some embodiments of the method, the modifying step comprises modifying the first subunit to comprise one or more of the following residues: (a) a K, A, G, R, S, or H residue at a position corresponding to position 48 of SEQ ID NO: 1; (b) an R, V, C, or S residue at a position corresponding to position 50 of SEQ ID NO: 1; (c) a G, R, V, S, A, T, N, D, or H residue at a position corresponding to position 71 of SEQ ID NO: 1; (d) an R, T, S, G, H, K, or Y residue at a position corresponding to position 72 of SEQ ID NO: 1; (e) an A, V, or T residue at a position corresponding to position 73 of SEQ ID NO: 1; and (f) an S, T, A, or G residue at a position corresponding to position 74 of SEQ ID NO: 1.

[0436] In some embodiments of the method, the first subunit is modified to comprise residues corresponding to residues 48, 50, 71, 72, 73, and 74 of any one of SEQ ID NOs: 436-462.

[0437] In some embodiments of the method, the method further comprises modifying the first subunit to comprise one or more of the following residues: (a) an A or S residue at a position corresponding to position 19 of SEQ ID NO: 1; (b) a Q or E residue at a position corresponding to position 80 of SEQ ID NO: 1; and (c) a K or R residue at a position corresponding to position 139 of SEQ ID NO: 1.

[0438] In some embodiments of the method, the first subunit is modified to comprise residues corresponding to residues 19, 80, and 139 of any one of SEQ ID NOs: 436-462.

[0439] In some embodiments of the method, the center sequence consists of GTGC.

[0440] In some embodiments of the method, the modifying step comprises modifying the first subunit to comprise one or more of the following residues: (a) a K, L, H, A, R, N, or S residue at a position corresponding to position 48 of SEQ ID NO: 1; (b) an R, S, V, K, I, or G residue at a position corresponding to position 50 of SEQ ID NO: 1; (c) a G, S, N, I, R, A, E, Q, Y, T, K, F, or V residue at a position corresponding to position 71 of SEQ ID NO: 1; (d) an R, K, G, H, P, S, C, N, T, A, M, D, or Q residue at a position corresponding to position 72 of SEQ ID NO: 1; (e) an A, V, T, N, C, or L residue at a position corresponding to position 73 of SEQ ID NO: 1; and (f) an S, A, or T residue at a position corresponding to position 74 of SEQ ID NO: 1.

[0441] In some embodiments of the method, the first subunit is modified to comprise residues corresponding to residues 48, 50, 71, 72, 73, and 74 of any one of SEQ ID NOs: 465-495.

[0442] In some embodiments of the method, the method further comprises modifying the first subunit to comprise one or more of the following residues: (a) an A or S residue at a position corresponding to position 19 of SEQ ID NO: 1; (b) a Q or E residue at a position corresponding to position 80 of SEQ ID NO: 1; and (c) a K, T, S, R, H, or V residue at a position corresponding to position 139 of SEQ ID NO: 1.

[0443] In some embodiments of the method, the first subunit is modified to comprise residues corresponding to residues 19, 80, and 139 of any one of SEQ ID NOs: 465-495.

[0444] In some embodiments of the method, the center sequence consists of GTGG.

[0445] In some embodiments of the method, the modifying step comprises modifying the first subunit to comprise one or more of the following residues: (a) an R residue at a position corresponding to position 50 of SEQ ID NO: 1; (b) an S residue at a position corresponding to position 71 of SEQ ID NO: 1; (c) a G residue at a position corresponding to position 72 of SEQ ID NO: 1; and (d) an R residue at a position corresponding to position 73 of SEQ ID NO: 1.

[0446] In some embodiments of the method, the first subunit is modified to comprise residues corresponding to residues 50, 71, 72, and 73 of SEQ ID NO: 498-501.

[0447] In some embodiments of the method, the method further comprises modifying the first subunit to comprise one or more of the following residues: (a) an A residue at a position corresponding to position 19 of SEQ ID NO: 1; (b) an I residue at a position corresponding to position 62 of SEQ ID NO: 1; and (c) a Q residue at a position corresponding to position 80 of SEQ ID NO: 1.

[0448] In some embodiments of the method, the first subunit is modified to comprise residues corresponding to residues 19, 62, and 80 of SEQ ID NO: 498-501.

[0449] In some embodiments of the method, the center sequence consists of GTGT.

[0450] In some embodiments of the method, the modifying step comprises modifying the first subunit to comprise one or more of the following residues: (a) a K, S, L, V, G, R, or N residue at a position corresponding to position 48 of SEQ ID NO: 1; (b) a Q, V, R, S, K, A, E, or C residue at a position corresponding to position 50 of SEQ ID NO: 1; (c) a G, R, N, H, A, or T residue at a position corresponding to position 71 of SEQ ID NO: 1; (d) an R, P, A, Q, K, T, G, or V residue at a position corresponding to position 72 of SEQ ID NO: 1; (e) an A, S, C, or T residue at a position corresponding to position 73 of SEQ ID NO: 1; and (f) an S, A, or T residue at a position corresponding to position 74 of SEQ ID NO: 1.

[0451] In some embodiments of the method, the first subunit is modified to comprise residues corresponding to residues 48, 50, 71, 72, 73, and 74 of any one of SEQ ID NOs: 504-529

[0452] In some embodiments of the method, the method further comprises modifying the first subunit to comprise one or more of the following residues: (a) an A or S residue at a position corresponding to position 19 of SEQ ID NO: 1; (b) a Q or E residue at a position corresponding to position 80 of SEQ ID NO: 1; and (c) a K or R residue at a position corresponding to position 139 of SEQ ID NO: 1.

[0453] In some embodiments of the method, the first subunit is modified to comprise residues corresponding to residues 19, 80, and 139 of any one of SEQ ID NOs: 504-529.

[0454] Another aspect is an I-CreI derived engineered meganuclease that binds and cleaves a recognition sequence comprising a center sequence consisting of ACAA, ACAG, ACAT, ACGA, ACGC, ACGG, ACGT, ATAA, ATAG, ATAT, ATGA, ATGG, TTGG, GCAA, GCAT, GCGA, GCAG, TCAA, or TTAA, wherein the engineered meganuclease comprises a first subunit and a second subunit, wherein the first subunit and the second subunit each comprise an amino acid sequence derived from SEQ ID NO: 1, and wherein the first subunit and the second subunit each comprise a substitution at one or more positions corresponding to positions 48, 50, 71, 72, 73, and 74 of SEQ ID NO: 1.

[0455] Another aspect is an improved engineered I-CreI-derived meganuclease that binds and cleaves a recognition sequence comprising a center sequence consisting of ACAA, ACAG, ACAT, ACGA, ACGC, ACGG, ACGT, ATAA, ATAG, ATAT, ATGA, ATGG, TTGG, GCAA, GCAT, GCGA, GCAG, TCAA, or TTAA, wherein the engineered meganuclease comprises a first subunit and a second subunit, wherein the first subunit and the second subunit each comprise an amino acid sequence derived from SEQ ID NO: 1, the improvement comprising any amino acid substitution described herein that improves cleavage activity of the engineered I-CreI-derived meganuclease for a recognition sequence comprising an ACAA, ACAG, ACAT, ACGA, ACGC, ACGG, ACGT, ATAA, ATAG, ATAT, ATGA, ATGG, TTGG, GCAA, GCAT, GCGA, GCAG, TCAA, or TTAA center sequence.

[0456] In some embodiments, the first subunit comprises one or more of the following residues: (a) an A, C, D, G, H, I, K, L, N, Q, R, S, or T residue at a position corresponding to position 48 of SEQ ID NO: 1; (b) an A, C, D, E, G, I, K, L, N, Q, R, S, T, V, or W residue at a position corresponding to position 50 of SEQ ID NO: 1; (c) an A, C, G, H, I, K, N, P, R, S, or T residue at a position corresponding to position 71 of SEQ ID NO: 1; (d) an A, D, G, H, K, L, M, N, P, Q, R, S, T, or V residue at a position corresponding to position 72 of SEQ ID NO: 1; (e) an A, C, G, I, S, T, or V residue at a position corresponding to position 73 of SEQ ID NO: 1; and (f) an A, C, T, or S residue at a position corresponding to position 74 of SEQ ID NO: 1.

[0457] In some embodiments, the second subunit comprises one or more of the following residues (a) an A, C, G, H, I, K, L, N, Q, R, S, or T residue at a position corresponding to position 48 of SEQ ID NO: 1; (b) an A, C, E, G, H, I, K, N, P, Q, R, S, T, or V residue at a position corresponding to position 50 of SEQ ID NO: 1; (c) an A, D, E, G, H, I, K, N, P, Q, R, S, T, or Y residue at a position corresponding to position 71 of SEQ ID NO: 1; (d) an A, C, E, G, H, I, K, M, N, P, Q, R, S, T, V, or Y residue at a position corresponding to position 72 of SEQ ID NO: 1; (e) an A, C, G, H, I, R, S, T, or V residue at a position corresponding to position 73 of SEQ ID NO: 1; and (f) an A, C, S, or T residue at a position corresponding to position 74 of SEQ ID NO: 1.

[0458] In some embodiments, the center sequence consists of ACAA, ACAG, ACAT, ACGC, ACGG, or ACGT, wherein the first subunit comprises one or more of the following residues (a) an A, C, G, H, I, K, L, N, Q, or S residue at a position corresponding to position 48 of SEQ ID NO: 1; (b) an A, C, K, Q, R, S, T, V, or W residue at a position corresponding to position 50 of SEQ ID NO: 1; (c) an A, G, P, or R residue at a position corresponding to position 71 of SEQ ID NO: 1; (d) an H, K, P, Q, R, or T residue at a position corresponding to position 72 of SEQ ID NO: 1; (e) an A, C, G, or V residue at a position corresponding to position 73 of SEQ ID NO: 1; and (f) a S residue at a position corresponding to position 74 of SEQ ID NO: 1.

[0459] In some embodiments, the center sequence consists of ATAA, ATAG, ATAT, ATGA, ATGG, wherein the first subunit comprises one or more of the following residues: (a) an A, C, D, G, H, K, L, N, Q, S, or T residue at a position corresponding to position 48 of SEQ ID NO: 1; (b) a C, D, E, G, I, K, N, R, S, T, or V residue at a position corresponding to position 50 of SEQ ID NO: 1; (c) a G, H, I, K, N, R, or S residue at a position corresponding to position 71 of SEQ ID NO: 1; (d) an A, G, H, K, L, N, P, Q, R, S, or T residue at a position corresponding to position 72 of SEQ ID NO: 1; (e) an A, C, S, or T residue at a position corresponding to position 73 of SEQ ID NO: 1; and (f) an A, C, or S residue at a position corresponding to position 74 of SEQ ID NO: 1.

[0460] In some embodiments, the center sequence consists of GCAA, GCAT, GCGA, or GCAG, wherein the first subunit comprises one or more of the following residues: (a) an A, H, K, or R residue at a position corresponding to position 48 of SEQ ID NO: 1; (b) a C, K, L, Q, R, S, T, or V residue at a position corresponding to position 50 of SEQ ID NO: 1; (c) an A, G, H, N, R, S, or T residue at a position corresponding to position 71 of SEQ ID NO: 1; (d) an A, G, H, M, N, P, Q, R, S, T, or V residue at a position corresponding to position 72 of SEQ ID NO: 1; (e) an A, C, I, T, or V residue at a position corresponding to position 73 of SEQ ID NO: 1; and (f) an A or S residue at a position corresponding to position 74 of SEQ ID NO: 1.

[0461] In some embodiments, the center sequence consists of TTGG or TTAA, wherein the first subunit comprises one or more of the following residues: (a) a K, N, R, or S residue at a position corresponding to position 48 of SEQ ID NO: 1; (b) a C, E, K, R, S, T, or V residue at a position corresponding to position 50 of SEQ ID NO: 1; (c) an A, G, K, N, R, or S residue at a position corresponding to position 71 of SEQ ID NO: 1; (d) an A, D, H, K, N, Q, R, S, or T residue at a position corresponding to position 72 of SEQ ID NO: 1; (e) an I or V residue at a position corresponding to position 73 of SEQ ID NO: 1; and (f) an A, S or T residue at a position corresponding to position 74 of SEQ ID NO: 1.

[0462] In some embodiments, the center sequence consists of TCAA, wherein the first subunit comprises one or more of the following residues: (a) an A, G, H, K, N, Q, R, or S residue at a position corresponding to position 48 of SEQ ID NO: 1; (b) a C, R, S, or T residue at a position corresponding to position 50 of SEQ ID NO: 1; (c) a G, R, S, or T residue at a position corresponding to position 71 of SEQ ID NO: 1; (d) a G, H, P, R, S, or T residue at a position corresponding to position 72 of SEQ ID NO: 1; (e) an I or V residue at a position corresponding to position 73 of SEQ ID NO: 1; and (f) an A or S residue at a position corresponding to position 74 of SEQ ID NO: 1.

[0463] In some embodiments, the center sequence consists of ACAA, ACAG, ACAT, ACGC, ACGG, or ACGT, wherein the second subunit comprises one or more of the following residues (a) an A, C, G, H, K, L, N, Q, R, S, or T residue at a position corresponding to position 48 of SEQ ID NO: 1; (b) an A, C, G, H, K, L, N, Q, R, S, or T residue at a position corresponding to position 50 of SEQ ID NO: 1; (c) an A, D, E, G, H, K, N, P, R, S, or T residue at a position corresponding to position 71 of SEQ ID NO: 1; (d) an A, G, H, K, M, N, P, P, Q, R, S, or T residue at a position corresponding to position 72 of SEQ ID NO: 1; (e) an A, C, G, H, I, R, S, T, or V residue at a position corresponding to position 73 of SEQ ID NO: 1; (f) optionally an R residue at a position directly following position corresponding to position 73 of SEQ ID NO: 1 (73B); and (g) an A, C, S, or T residue at a position corresponding to position 74 of SEQ ID NO: 1.

[0464] In some embodiments, the center sequence consists of ATAA, ATAG, ATAT, ATGA, or ATGG, wherein the second subunit comprises one or more of the following residues: (a) an A, C, G, H, K, N, Q, R, S, or T residue at a position corresponding to position 48 of SEQ ID NO: 1; (b) an A, C, E, I, K, N, Q, R, S, or T residue at a position corresponding to position 50 of SEQ ID NO: 1; (c) an A, C, E, I, K, N, Q, R, S, or T residue at a position corresponding to position 71 of SEQ ID NO: 1; (d) an A, G, H, K, N, Q, R, S, T, V, or Y residue at a position corresponding to position 72 of SEQ ID NO: 1; (e) an A, C, G, H, I, R, S, or V residue at a position corresponding to position 73 of SEQ ID NO: 1; (f) optionally an R residue at a position directly following position corresponding to position 73 of SEQ ID NO: 1 (73B); and (g) an A, C, S, or T residue at a position corresponding to position 74 of SEQ ID NO: 1.

[0465] In some embodiments, the center sequence consists of GCAA, GCAT, GCGA, or GCAG, wherein the second subunit comprises one or more of the following residues: (a) an A, C, G, H, I, K, L, N, Q, R, S, or T residue at a position corresponding to position 48 of SEQ ID NO: 1; (b) a C, E, H, K, Q, R, S, T, or V residue at a position corresponding to position 50 of SEQ ID NO: 1; (c) an A, G, H, K, R, S, T, or Y residue at a position corresponding to position 71 of SEQ ID NO: 1; (d) an A, C, E, G, H, K, N, Q, R, S, T, or Y residue at a position corresponding to position 72 of SEQ ID NO: 1; (e) an A, C, G, H, I, R, S, or V residue at a position corresponding to position 73 of SEQ ID NO: 1; and (f) an A, S, or T residue at a position corresponding to position 74 of SEQ ID NO: 1.

[0466] In some embodiments, the center sequence consists of TTGG or TTAA, wherein the second subunit comprises one or more of the following residues: (a) an A, K, S, or T residue at a position corresponding to position 48 of SEQ ID NO: 1; (b) a C, E, K, R, or T residue at a position corresponding to position 50 of SEQ ID NO: 1; (c) an A, D, G, K, Q, R, S, or T residue at a position corresponding to position 71 of SEQ ID NO: 1; (d) a G, I, R, S, T, or V residue at a position corresponding to position 72 of SEQ ID NO: 1; (e) an I, R, or V residue at a position corresponding to position 73 of SEQ ID NO: 1; and (f) an A, S, or T residue at a position corresponding to position 74 of SEQ ID NO: 1.

[0467] In some embodiments, the center sequence consists of TCAA, wherein the second subunit comprises one or more of the following residues: (a) a K or S residue at a position corresponding to position 48 of SEQ ID NO: 1; (b) a C, K, R, or T residue at a position corresponding to position 50 of SEQ ID NO: 1; (c) a G, R, or T residue at a position corresponding to position 71 of SEQ ID NO: 1; (d) a G, P, R, S, or T residue at a position corresponding to position 72 of SEQ ID NO: 1; (e) a I or V residue at a position corresponding to position 73 of SEQ ID NO: 1; and (f) an A, S, or T residue at a position corresponding to position 74 of SEQ ID NO: 1.

[0468] In some embodiments: (a) the center sequence is ACAA and the first subunit comprises residues corresponding to residues 48, 50, 71, 72, 73, and 74 of any one of SEQ ID NOs: 11-33, (b) the center sequence is ACAG and the first subunit comprises residues corresponding to residues 48, 50, 71, 72, 73, and 74 of any one of SEQ ID NOs: 36-43, (c) the center sequence is ACAT and the first subunit comprises residues corresponding to residues 48, 50, 71, 72, 73, and 74 of any one of SEQ ID NOs: 46-67, (d) the center sequence is ACGA and the first subunit comprises residues corresponding to residues 48, 50, 71, 72, 73, and 74 of any one of SEQ ID NOs: 70-89, (e) the center sequence is ACGC and the first subunit comprises residues corresponding to residues 48, 50, 71, 72, 73, and 74 of any one of SEQ ID NOs: 92-118, (f) the center sequence is ACGG and the first subunit comprises residues corresponding to residues 48, 50, 71, 72, 73, and 74 of any one of SEQ ID NOs: 121-135, (g) the center sequence is ACGT and the first subunit comprises residues corresponding to residues 48, 50, 71, 72, 73, and 74 of any one of SEQ ID NOs: 138-156, (h) the center sequence is ATAA and the first subunit comprises residues corresponding to residues 48, 50, 71, 72, 73, and 74 of any one of SEQ ID NOs: 159-183, (i) the center sequence is ATAG and the first subunit comprises residues corresponding to residues 48, 50, 71, 72, 73, and 74 of any one of SEQ ID NOs: 186-199, (j) the center sequence is ATAT and the first subunit comprises residues corresponding to residues 48, 50, 71, 72, 73, and 74 of any one of SEQ ID NOs: 202-219, (k) the center sequence is ATGA and the first subunit comprises residues corresponding to residues 48, 50, 71, 72, 73, and 74 of any one of SEQ ID NOs: 222-243, (1) the center sequence is ATGG and the first subunit comprises residues corresponding to residues 48, 50, 71, 72, 73, and 74 of any one of SEQ ID NOs: 246-247, (m) the center sequence is TTGG and the first subunit comprises residues corresponding to residues 48, 50, 71, 72, 73, and 74 of any one of SEQ ID NOs: 250-266, (n) the center sequence is GCAA and the first subunit comprises residues corresponding to residues 48, 50, 71, 72, 73, and 74 of any one of SEQ ID NOs: 269-291, (o) the center sequence is GCAT and the first subunit comprises residues corresponding to residues 48, 50, 71, 72, 73, and 74 of any one of SEQ ID NOs: 294-313, (p) the center sequence is GCGA and the first subunit comprises residues corresponding to residues 48, 50, 71, 72, 73, and 74 of any one of SEQ ID NOs: 316-325, (q) the center sequence is GCAG and the first subunit comprises residues corresponding to residues 48, 50, 71, 72, 73, and 74 of any one of SEQ ID NOs: 328-330, (r) the center sequence is TCAA and the first subunit comprises residues corresponding to residues 48, 50, 71, 72, 73, and 74 of any one of SEQ ID NOs: 333-340, or (s) the center sequence is TTAA and the first subunit comprises residues corresponding to residues 48, 50, 71, 72, 73, and 74 of any one of SEQ ID NOs: 343-357.

[0469] In some embodiments: (a) the center sequence is ACAA and the second subunit comprises residues corresponding to residues 48, 50, 71, 72, 73, and 74 of any one of SEQ ID NOs: 11-33, (b) the center sequence is ACAG and the second subunit comprises residues corresponding to residues 48, 50, 71, 72, 73, and 74 of any one of SEQ ID NOs: 36-43, (c) the center sequence is ACAT and the second subunit comprises residues corresponding to residues 48, 50, 71, 72, 73, and 74 of any one of SEQ ID NOs: 46-67, (d) the center sequence is ACGA and the second subunit comprises residues corresponding to residues 48, 50, 71, 72, 73, and 74 of any one of SEQ ID NOs: 70-89, (e) the center sequence is ACGC and the second subunit comprises residues corresponding to residues 48, 50, 71, 72, 73, and 74 of any one of SEQ ID NOs: 92-118, (f) the center sequence is ACGG and the second subunit comprises residues corresponding to residues 48, 50, 71, 72, 73, and 74 of any one of SEQ ID NOs: 121-135, (g) the center sequence is ACGT and the second subunit comprises residues corresponding to residues 48, 50, 71, 72, 73, and 74 of any one of SEQ ID NOs: 138-156, (h) the center sequence is ATAA and the second subunit comprises residues corresponding to residues 48, 50, 71, 72, 73, and 74 of any one of SEQ ID NOs: 159-183, (i) the center sequence is ATAG and the second subunit comprises residues corresponding to residues 48, 50, 71, 72, 73, and 74 of any one of SEQ ID NOs: 186-199, (j) the center sequence is ATAT and the second subunit comprises residues corresponding to residues 48, 50, 71, 72, 73, and 74 of any one of SEQ ID NOs: 202-219, (k) the center sequence is ATGA and the second subunit comprises residues corresponding to residues 48, 50, 71, 72, 73, and 74 of any one of SEQ ID NOs: 222-243, (1) the center sequence is ATGG and the second subunit comprises residues corresponding to residues 48, 50, 71, 72, 73, and 74 of any one of SEQ ID NOs: 246-247, (m) the center sequence is TTGG and the second subunit comprises residues corresponding to residues 48, 50, 71, 72, 73, and 74 of any one of SEQ ID NOs: 250-266, (n) the center sequence is GCAA and the second subunit comprises residues corresponding to residues 48, 50, 71, 72, 73, and 74 of any one of SEQ ID NOs: 269-291, (o) the center sequence is GCAT and the second subunit comprises residues corresponding to residues 48, 50, 71, 72, 73, and 74 of any one of SEQ ID NOs: 294-313, (p) the center sequence is GCGA and the second subunit comprises residues corresponding to residues 48, 50, 71, 72, 73, and 74 of any one of SEQ ID NOs: 316-325, (q) the center sequence is GCAG and the second subunit comprises residues corresponding to residues 48, 50, 71, 72, 73, and 74 of any one of SEQ ID NOs: 328-330, (r) the center sequence is TCAA and the second subunit comprises residues corresponding to residues 48, 50, 71, 72, 73, and 74 of any one of SEQ ID NOs: 333-340, or (s) the center sequence is TTAA and the second subunit comprises residues corresponding to residues 48, 50, 71, 72, 73, and 74 of any one of SEQ ID NOs: 343-357. Another aspect is a method for cleaving double-stranded DNA at a target site comprising a meganuclease recognition sequence, wherein the recognition sequence comprises a center sequence consisting of ACAA, ACAG, ACAT, ACGA, ACGC, ACGG, ACGT, ATAA, ATAG, ATAT, ATGA, ATGG, TTGG, GCAA, GCAT, GCGA, GCAG, TCAA, or TTAA, wherein the method comprises contacting the double-stranded DNA having the target site with any engineered meganuclease described herein, wherein the engineered meganuclease binds and cleaves the recognition sequence.

[0470] Another aspect is an improved method for cleaving double-stranded DNA at a target site comprising a meganuclease recognition sequence by contacting said double-stranded DNA having said target site with an engineered I-CreI-derived meganuclease, wherein the engineered meganuclease comprises a first subunit and a second subunit, wherein the first subunit and the second subunit each comprise an amino acid sequence derived from SEQ ID NO: 1, wherein said recognition sequence comprises a center sequence consisting of ACAA, ACAG, ACAT, ACGA, ACGC, ACGG, ACGT, ATAA, ATAG, ATAT, ATGA, ATGG, TTGG, GCAA, GCAT, GCGA, GCAG, TCAA, or TTAA, the improvement comprising: use of an engineered I-CreI-derived meganuclease described herein, wherein said engineered I-CreI-derived meganuclease binds and cleaves said recognition sequence.

[0471] Another aspect is a method for increasing the cleavage activity of an I-CreI engineered meganuclease that binds and cleaves a recognition sequence comprising a center sequence consisting of ACAA, ACAG, ACAT, ACGA, ACGC, ACGG, ACGT, ATAA, ATAG, ATAT, ATGA, ATGG, TTGG, GCAA, GCAT, GCGA, GCAG, TCAA, or TTAA, wherein the engineered meganuclease comprises a first subunit and a second subunit, wherein the first subunit and the second subunit each comprise an amino acid sequence derived from SEQ ID NO: 1, the method comprising modifying each of the first subunit and the second subunit at one or more positions corresponding to positions 48, 50, 71, 72, 73, and 74 of SEQ ID NO: 1, wherein the modified nuclease has increased cleavage activity when compared to a control engineered meganuclease.

[0472] Another aspect is an improved method for increasing the cleavage activity of an engineered I-CreI-derived meganuclease that binds and cleaves a recognition sequence comprising a center sequence consisting of ACAA, ACAG, ACAT, ACGA, ACGC, ACGG, ACGT, ATAA, ATAG, ATAT, ATGA, ATGG, TTGG, GCAA, GCAT, GCGA, GCAG, TCAA, or TTAA, wherein the engineered meganuclease comprises a first subunit and a second subunit, wherein the first subunit and the second subunit each comprise an amino acid sequence derived from SEQ ID NO: 1, the improvement comprising use of an engineered I-CreI-derived meganuclease described herein, wherein said engineered I-CreI-derived meganuclease binds and cleaves said recognition sequence.

[0473] In some embodiments of the method, the modifying step comprises modifying the first subunit to comprise one or more of the following residues: (a) an A, C, D, G, H, I, K, L, N, Q, R, S, or T residue at a position corresponding to position 48 of SEQ ID NO: 1; (b) an A, C, D, E, G, I, K, L, N, Q, R, S, T, V, or W residue at a position corresponding to position 50 of SEQ ID NO: 1; (c) an A, C, G, H, I, K, N, P, R, S, or T residue at a position corresponding to position 71 of SEQ ID NO: 1; (d) an A, D, G, H, K, L, M, N, P, Q, R, S, T, or V residue at a position corresponding to position 72 of SEQ ID NO: 1; (e) an A, C, G, I, S, T, or V residue at a position corresponding to position 73 of SEQ ID NO: 1; and (f) an A, C, T, or S residue at a position corresponding to position 74 of SEQ ID NO: 1.

[0474] In some embodiments of the method, the modifying step comprises modifying the second subunit to comprise one or more of the following residues: (a) an A, C, G, H, I, K, L, N, Q, R, S, or T residue at a position corresponding to position 48 of SEQ ID NO: 1; (b) an A, C, E, G, H, I, K, N, P, Q, R, S, T, or V residue at a position corresponding to position 50 of SEQ ID NO: 1; (c) an A, D, E, G, H, I, K, N, P, Q, R, S, T, or Y residue at a position corresponding to position 71 of SEQ ID NO: 1; (d) an A, C, E, G, H, I, K, M, N, P, Q, R, S, T, V, or Y residue at a position corresponding to position 72 of SEQ ID NO: 1; (e) an A, C, G, H, I, R, S, T, or V residue at a position corresponding to position 73 of SEQ ID NO: 1; and (f) an A, C, S, or T residue at a position corresponding to position 74 of SEQ ID NO: 1.

[0475] In some embodiments of the method, the center sequence consists of ACAA, ACAG, ACAT, ACGC, ACGG, or ACGT, and wherein the modifying step comprises modifying the first subunit to comprise one or more of the following residues: (a) an A, C, G, H, I, K, L, N, Q, or S residue at a position corresponding to position 48 of SEQ ID NO: 1; (b) an A, C, K, Q, R, S, T, V, or W residue at a position corresponding to position 50 of SEQ ID NO: 1; (c) an A, G, P, or R residue at a position corresponding to position 71 of SEQ ID NO: 1; (d) an H, K, P, Q, R, or T residue at a position corresponding to position 72 of SEQ ID NO: 1; (e) an A, C, G, or V residue at a position corresponding to position 73 of SEQ ID NO: 1; and (f) a S residue at a position corresponding to position 74 of SEQ ID NO: 1.

[0476] In some embodiments of the method, the center sequence consists of ATAA, ATAG, ATAT, ATGA, or ATGG, and wherein the modifying step comprises modifying the first subunit to comprise one or more of the following residues: (a) an A, C, D, G, H, K, L, N, Q, S, or T residue at a position corresponding to position 48 of SEQ ID NO: 1; (b) a C, D, E, G, I, K, N, R, S, T, or V residue at a position corresponding to position 50 of SEQ ID NO: 1; (c) a G, H, I, K, N, R, or S residue at a position corresponding to position 71 of SEQ ID NO: 1; (d) an A, G, H, K, L, N, P, Q, R, S, or T residue at a position corresponding to position 72 of SEQ ID NO: 1; (e) an A, C, S, or T residue at a position corresponding to position 73 of SEQ ID NO: 1; and (f) an A, C, or S residue at a position corresponding to position 74 of SEQ ID NO: 1.

[0477] In some embodiments of the method, the center sequence consists of GCAA, GCAT, GCGA, or GCAG, and wherein the modifying step comprises modifying the first subunit to comprise one or more of the following residues: (a) an A, H, K, or R residue at a position corresponding to position 48 of SEQ ID NO: 1; (b) a C, K, L, Q, R, S, T, or V residue at a position corresponding to position 50 of SEQ ID NO: 1; (c) an A, G, H, N, R, S, or T residue at a position corresponding to position 71 of SEQ ID NO: 1; (d) an A, G, H, M, N, P, Q, R, S, T, or V residue at a position corresponding to position 72 of SEQ ID NO: 1; (e) an A, C, I, T, or V residue at a position corresponding to position 73 of SEQ ID NO: 1; and (f) an A or S residue at a position corresponding to position 74 of SEQ ID NO: 1.

[0478] In some embodiments of the method, the center sequence consists of TTGG or TTAA, and wherein the modifying step comprises modifying the first subunit to comprise one or more of the following residues: (a) a K, N, R, or S residue at a position corresponding to position 48 of SEQ ID NO: 1; (b) a C, E, K, R, S, T, or V residue at a position corresponding to position 50 of SEQ ID NO: 1; (c) an A, G, K, N, R, or S residue at a position corresponding to position 71 of SEQ ID NO: 1; (d) an A, D, H, K, N, Q, R, S, or T residue at a position corresponding to position 72 of SEQ ID NO: 1; (e) an I or V residue at a position corresponding to position 73 of SEQ ID NO: 1; and (f) an A, S or T residue at a position corresponding to position 74 of SEQ ID NO: 1.

[0479] In some embodiments of the method, the center sequence consists of TCAA, and wherein the modifying step comprises modifying the first subunit to comprise one or more of the following residues: (a) an A, G, H, K, N, Q, R, or S residue at a position corresponding to position 48 of SEQ ID NO: 1; (b) a C, R, S, or T residue at a position corresponding to position 50 of SEQ ID NO: 1; (c) a G, R, S, or T residue at a position corresponding to position 71 of SEQ ID NO: 1; (d) a G, H, P, R, S, or T residue at a position corresponding to position 72 of SEQ ID NO: 1; (e) an I or V residue at a position corresponding to position 73 of SEQ ID NO: 1; and (f) an A or S residue at a position corresponding to position 74 of SEQ ID NO: 1.

[0480] In some embodiments of the method, the center sequence consists of ACAA, ACAG, ACAT, ACGC, ACGG, or ACGT, and wherein the modifying step comprises modifying the second subunit to comprise one or more of the following residues: (a) an A, C, G, H, K, L, N, Q, R, S, or T residue at a position corresponding to position 48 of SEQ ID NO: 1; (b) an A, C, G, H, K, L, N, Q, R, S, or T residue at a position corresponding to position 50 of SEQ ID NO: 1; (c) an A, D, E, G, H, K, N, P, R, S, or T residue at a position corresponding to position 71 of SEQ ID NO: 1; (d) an A, G, H, K, M, N, P, P, Q, R, S, or T residue at a position corresponding to position 72 of SEQ ID NO: 1; (e) an A, C, G, H, I, R, S, T, or V residue at a position corresponding to position 73 of SEQ ID NO: 1; (f) optionally an R residue at a position directly following position corresponding to position 73 of SEQ ID NO: 1 (73B); and (g) an A, C, S, or T residue at a position corresponding to position 74 of SEQ ID NO: 1.

[0481] In some embodiments of the method, the center sequence consists of ATAA, ATAG, ATAT, ATGA, or ATGG, and wherein the modifying step comprises modifying the second subunit to comprise one or more of the following residues: (a) an A, C, G, H, K, N, Q, R, S, or T residue at a position corresponding to position 48 of SEQ ID NO: 1; (b) an A, C, E, I, K, N, Q, R, S, or T residue at a position corresponding to position 50 of SEQ ID NO: 1; (c) an A, C, E, I, K, N, Q, R, S, or T residue at a position corresponding to position 71 of SEQ ID NO: 1; (d) an A, G, H, K, N, Q, R, S, T, V, or Y residue at a position corresponding to position 72 of SEQ ID NO: 1; (e) an A, C, G, H, I, R, S, or V residue at a position corresponding to position 73 of SEQ ID NO: 1; (f) optionally an R residue at a position directly following position corresponding to position 73 of SEQ ID NO: 1 (73B); and (g) an A, C, S, or T residue at a position corresponding to position 74 of SEQ ID NO: 1.

[0482] In some embodiments of the method, the center sequence consists of GCAA, GCAT, GCGA, or GCAG, and wherein the modifying step comprises modifying the second subunit to comprise one or more of the following residues: (a) an A, C, G, H, I, K, L, N, Q, R, S, or T residue at a position corresponding to position 48 of SEQ ID NO: 1; (b) a C, E, H, K, Q, R, S, T, or V residue at a position corresponding to position 50 of SEQ ID NO: 1; (c) an A, G, H, K, R, S, T, or Y residue at a position corresponding to position 71 of SEQ ID NO: 1; (d) an A, C, E, G, H, K, N, Q, R, S, T, or Y residue at a position corresponding to position 72 of SEQ ID NO: 1; (e) an A, C, G, H, I, R, S, or V residue at a position corresponding to position 73 of SEQ ID NO: 1; and (f) an A, S, or T residue at a position corresponding to position 74 of SEQ ID NO: 1.

[0483] In some embodiments of the method, the center sequence consists of TTGG or TTAA, and wherein the modifying step comprises modifying the second subunit to comprise one or more of the following residues: (a) an A, K, S, or T residue at a position corresponding to position 48 of SEQ ID NO: 1; (b) a C, E, K, R, or T residue at a position corresponding to position 50 of SEQ ID NO: 1; (c) an A, D, G, K, Q, R, S, or T residue at a position corresponding to position 71 of SEQ ID NO: 1; (d) a G, I, R, S, T, or V residue at a position corresponding to position 72 of SEQ ID NO: 1; (e) an I, R, or V residue at a position corresponding to position 73 of SEQ ID NO: 1; and (f) an A, S, or T residue at a position corresponding to position 74 of SEQ ID NO: 1.

[0484] In some embodiments of the method, the center sequence consists of TCAA, and wherein the modifying step comprises modifying the second subunit to comprise one or more of the following residues: (a) a K or S residue at a position corresponding to position 48 of SEQ ID NO: 1; (b) a C, K, R, or T residue at a position corresponding to position 50 of SEQ ID NO: 1; (c) a G, R, or T residue at a position corresponding to position 71 of SEQ ID NO: 1; (d) a G, P, R, S, or T residue at a position corresponding to position 72 of SEQ ID NO: 1; (e) a I or V residue at a position corresponding to position 73 of SEQ ID NO: 1; and (f) an A, S, or T residue at a position corresponding to position 74 of SEQ ID NO: 1.

[0485] In some embodiments of the method: (a) the center sequence is ACAA and the first subunit comprises residues corresponding to residues 48, 50, 71, 72, 73, and 74 of any one of SEQ ID NOs: 11-33, (b) the center sequence is ACAG and the first subunit comprises residues corresponding to residues 48, 50, 71, 72, 73, and 74 of any one of SEQ ID NOs: 36-43, (c) the center sequence is ACAT and the first subunit comprises residues corresponding to residues 48, 50, 71, 72, 73, and 74 of any one of SEQ ID NOs: 46-67, (d) the center sequence is ACGA and the first subunit comprises residues corresponding to residues 48, 50, 71, 72, 73, and 74 of any one of SEQ ID NOs: 70-89, (e) the center sequence is ACGC and the first subunit comprises residues corresponding to residues 48, 50, 71, 72, 73, and 74 of any one of SEQ ID NOs: 92-118, (f) the center sequence is ACGG and the first subunit comprises residues corresponding to residues 48, 50, 71, 72, 73, and 74 of any one of SEQ ID NOs: 121-135, (g) the center sequence is ACGT and the first subunit comprises residues corresponding to residues 48, 50, 71, 72, 73, and 74 of any one of SEQ ID NOs: 138-156, (h) the center sequence is ATAA and the first subunit comprises residues corresponding to residues 48, 50, 71, 72, 73, and 74 of any one of SEQ ID NOs: 159-183, (i) the center sequence is ATAG and the first subunit comprises residues corresponding to residues 48, 50, 71, 72, 73, and 74 of any one of SEQ ID NOs: 186-199, (j) the center sequence is ATAT and the first subunit comprises residues corresponding to residues 48, 50, 71, 72, 73, and 74 of any one of SEQ ID NOs: 202-219, (k) the center sequence is ATGA and the first subunit comprises residues corresponding to residues 48, 50, 71, 72, 73, and 74 of any one of SEQ ID NOs: 222-243, (1) the center sequence is ATGG and the first subunit comprises residues corresponding to residues 48, 50, 71, 72, 73, and 74 of any one of SEQ ID NOs: 246-247, (m) the center sequence is TTGG and the first subunit comprises residues corresponding to residues 48, 50, 71, 72, 73, and 74 of any one of SEQ ID NOs: 250-266, (n) the center sequence is GCAA and the first subunit comprises residues corresponding to residues 48, 50, 71, 72, 73, and 74 of any one of SEQ ID NOs: 269-291, (o) the center sequence is GCAT and the first subunit comprises residues corresponding to residues 48, 50, 71, 72, 73, and 74 of any one of SEQ ID NOs: 294-313, (p) the center sequence is GCGA and the first subunit comprises residues corresponding to residues 48, 50, 71, 72, 73, and 74 of any one of SEQ ID NOs: 316-325, (q) the center sequence is GCAG and the first subunit comprises residues corresponding to residues 48, 50, 71, 72, 73, and 74 of any one of SEQ ID NOs: 328-330, (r) the center sequence is TCAA and the first subunit comprises residues corresponding to residues 48, 50, 71, 72, 73, and 74 of any one of SEQ ID NOs: 333-340, or (s) the center sequence is TTAA and the first subunit comprises residues corresponding to residues 48, 50, 71, 72, 73, and 74 of any one of SEQ ID NOs: 343-357.

[0486] In some embodiments of the method: (a) the center sequence is ACAA and the second subunit comprises residues corresponding to residues 48, 50, 71, 72, 73, and 74 of any one of SEQ ID NOs: 11-33, (b) the center sequence is ACAG and the second subunit comprises residues corresponding to residues 48, 50, 71, 72, 73, and 74 of any one of SEQ ID NOs: 36-43, (c) the center sequence is ACAT and the second subunit comprises residues corresponding to residues 48, 50, 71, 72, 73, and 74 of any one of SEQ ID NOs: 46-67, (d) the center sequence is ACGA and the second subunit comprises residues corresponding to residues 48, 50, 71, 72, 73, and 74 of any one of SEQ ID NOs: 70-89, (e) the center sequence is ACGC and the second subunit comprises residues corresponding to residues 48, 50, 71, 72, 73, and 74 of any one of SEQ ID NOs: 92-118, (f) the center sequence is ACGG and the second subunit comprises residues corresponding to residues 48, 50, 71, 72, 73, and 74 of any one of SEQ ID NOs: 121-135, (g) the center sequence is ACGT and the second subunit comprises residues corresponding to residues 48, 50, 71, 72, 73, and 74 of any one of SEQ ID NOs: 138-156, (h) the center sequence is ATAA and the second subunit comprises residues corresponding to residues 48, 50, 71, 72, 73, and 74 of any one of SEQ ID NOs: 159-183, (i) the center sequence is ATAG and the second subunit comprises residues corresponding to residues 48, 50, 71, 72, 73, and 74 of any one of SEQ ID NOs: 186-199, (j) the center sequence is ATAT and the second subunit comprises residues corresponding to residues 48, 50, 71, 72, 73, and 74 of any one of SEQ ID NOs: 202-219, (k) the center sequence is ATGA and the second subunit comprises residues corresponding to residues 48, 50, 71, 72, 73, and 74 of any one of SEQ ID NOs: 222-243, (1) the center sequence is ATGG and the second subunit comprises residues corresponding to residues 48, 50, 71, 72, 73, and 74 of any one of SEQ ID NOs: 246-247, (m) the center sequence is TTGG and the second subunit comprises residues corresponding to residues 48, 50, 71, 72, 73, and 74 of any one of SEQ ID NOs: 250-266, (n) the center sequence is GCAA and the second subunit comprises residues corresponding to residues 48, 50, 71, 72, 73, and 74 of any one of SEQ ID NOs: 269-291, (o) the center sequence is GCAT and the second subunit comprises residues corresponding to residues 48, 50, 71, 72, 73, and 74 of any one of SEQ ID NOs: 294-313, (p) the center sequence is GCGA and the second subunit comprises residues corresponding to residues 48, 50, 71, 72, 73, and 74 of any one of SEQ ID NOs: 316-325, (q) the center sequence is GCAG and the second subunit comprises residues corresponding to residues 48, 50, 71, 72, 73, and 74 of any one of SEQ ID NOs: 328-330, (r) the center sequence is TCAA and the second subunit comprises residues corresponding to residues 48, 50, 71, 72, 73, and 74 of any one of SEQ ID NOs: 333-340, or (s) the center sequence is TTAA and the second subunit comprises residues corresponding to residues 48, 50, 71, 72, 73, and 74 of any one of SEQ ID NOs: 343-357.

[0487] Another aspect is an I-CreI derived engineered meganuclease having specificity for a recognition sequence comprising a center sequence consisting of GTAA, GTAG, GTAT, GTGA, GTGC, GTGG, or GTGT, wherein the engineered meganuclease comprises a first subunit and a second subunit, wherein the first subunit comprises an amino acid sequence derived from SEQ ID NO: 1, and wherein the first subunit comprises a substitution at one or more positions corresponding to positions 48, 50, 71, 72, 73, and 74 of SEQ ID NO: 1.

[0488] Another aspect is an improved engineered I-CreI-derived meganuclease that binds and cleaves a recognition sequence comprising a center sequence consisting of GTAA, GTAG, GTAT, GTGA, GTGC, GTGG, or GTGT, wherein the engineered meganuclease comprises a first subunit and a second subunit, wherein the first subunit and the second subunit each comprise an amino acid sequence derived from SEQ ID NO: 1, the improvement comprising any amino acid substitution described herein that improves cleavage activity of the GTAA, GTAG, GTAT, GTGA, GTGC, GTGG, or GTGT center sequence.

[0489] In some embodiments, the first subunit comprises one or more of the following residues: (a) an A, C, G, H, K, L, M, N, Q, R, S, T, or V residue at a position corresponding to position 48 of SEQ ID NO: 1; (b) an A, C, E, G, I, K, L, Q, R, S, T, or V residue at a position corresponding to position 50 of SEQ ID NO: 1; (c) an A, D, E, F, G, H, I, K, L, N, Q, R, S, T, V, or Y residue at a position corresponding to position 71 of SEQ ID NO: 1; (d) an A, C, D, G, H, K, M, N, P, Q, R, S, T, V, W, or Y residue at a position corresponding to position 72 of SEQ ID NO: 1; (e) an A, C, I, L, N, R, S, T, or V residue at a position corresponding to position 73 of SEQ ID NO: 1; and (f) an A, C, G, S, or T residue at a position corresponding to position 74 of SEQ ID NO: 1.

[0490] In some embodiments, the second subunit comprises one or more of the following residues: (a) a K residue at a position corresponding to position 48 of SEQ ID NO: 1; (b) a Q residue at a position corresponding to position 50 of SEQ ID NO: 1; (c) a G residue at a position corresponding to position 71 of SEQ ID NO: 1; (d) a S residue at a position corresponding to position 72 of SEQ ID NO: 1; (e) a V residue at a position corresponding to position 73 of SEQ ID NO: 1; and (f) a S residue at a position corresponding to position 74 of SEQ ID NO: 1.

[0491] In some embodiments: (a) the center sequence is GTAA and the first subunit comprises residues corresponding to residues 48, 50, 71, 72, 73, and 74 of any one of SEQ ID NOs: 360-389, (b) the center sequence is GTAG and the first subunit comprises residues corresponding to residues 48, 50, 71, 72, 73, and 74 of any one of SEQ ID NOs: 392-399, (c) the center sequence is GTAT and the first subunit comprises residues corresponding to residues 48, 50, 71, 72, 73, and 74 of any one of SEQ ID NOs: 402-433, (d) the center sequence is GTGA and the first subunit comprises residues corresponding to residues 48, 50, 71, 72, 73, and 74 of any one of SEQ ID NOs: 436-462, (e) the center sequence is GTGC and the first subunit comprises residues corresponding to residues 48, 50, 71, 72, 73, and 74 of any one of SEQ ID NOs: 465-495, (f) the center sequence is GTGG and the first subunit comprises residues corresponding to residues 48, 50, 71, 72, 73, and 74 of any one of SEQ ID NOs: 498-501, or (g) the center sequence is GTGT and the first subunit comprises residues corresponding to residues 48, 50, 71, 72, 73, and 74 of any one of SEQ ID NOs: 504-529.

[0492] Another aspect is a method for cleaving double-stranded DNA at a target site comprising a meganuclease recognition sequence, wherein the recognition sequence comprises a center sequence consisting of GTAA, GTAG, GTAT, GTGA, GTGC, GTGG, or GTGT, wherein the method comprises contacting the double-stranded DNA having the target site with any engineered meganuclease described herein, wherein the engineered meganuclease binds and cleaves the recognition sequence.

[0493] Another aspect is an improved method for cleaving double-stranded DNA at a target site comprising a meganuclease recognition sequence, by contacting said double-stranded DNA having said target site with an engineered I-CreI-derived meganuclease, wherein the engineered meganuclease comprises a first subunit and a second subunit, wherein the first subunit and the second subunit each comprise an amino acid sequence derived from SEQ ID NO: 1, wherein said recognition sequence comprises a center sequence consisting of GTAA, GTAG, GTAT, GTGA, GTGC, GTGG, or GTGT, the improvement comprising: use of an engineered I-CreI-derived meganuclease described herein, wherein said engineered I-CreI-derived meganuclease binds and cleaves said recognition sequence.

[0494] Another aspect is a method for increasing the cleavage activity of an I-CreI derived engineered meganuclease that binds and cleaves a recognition sequence comprising a center sequence consisting of GTAA, GTAG, GTAT, GTGA, GTGC, GTGG, or GTGT, wherein the engineered meganuclease comprises a first subunit and a second subunit, wherein the first subunit comprises an amino acid sequence derived from SEQ ID NO: 1, the method comprising modifying the first subunit at one or more positions corresponding to positions 48, 50, 71, 72, 73, and 74 of SEQ ID NO: 1, wherein the modified nuclease has increased cleavage activity when compared to a control engineered meganuclease.

[0495] Another aspect is an improved method for increasing the cleavage activity of an engineered meganuclease that binds and cleaves a recognition sequence comprising a center sequence consisting of GTAA, GTAG, GTAT, GTGA, GTGC, GTGG, or GTGT, wherein the engineered meganuclease comprises a first subunit and a second subunit, wherein the first subunit and the second subunit each comprise an amino acid sequence derived from SEQ ID NO: 1, the improvement comprising use of an engineered I-CreI-derived meganuclease described herein, wherein said engineered I-CreI-derived meganuclease binds and cleaves said recognition sequence.

[0496] In some embodiments of the method, the modifying step comprises modifying the first subunit to comprise one or more of the following residues: (a) an A, C, G, H, K, L, M, N, Q, R, S, T, or V residue at a position corresponding to position 48 of SEQ ID NO: 1; (b) an A, C, E, G, I, K, L, Q, R, S, T, or V residue at a position corresponding to position 50 of SEQ ID NO: 1; (c) an A, D, E, F, G, H, I, K, L, N, Q, R, S, T, V, or Y residue at a position corresponding to position 71 of SEQ ID NO: 1; (d) an A, C, D, G, H, K, M, N, P, Q, R, S, T, V, W, or Y residue at a position corresponding to position 72 of SEQ ID NO: 1; (e) an A, C, I, L, N, R, S, T, or V residue at a position corresponding to position 73 of SEQ ID NO: 1; and (f) an A, C, G, S, or T residue at a position corresponding to position 74 of SEQ ID NO: 1.

[0497] In some embodiments of the method, the second subunit comprises one or more of the following residues: (a) a K residue at a position corresponding to position 48 of SEQ ID NO: 1; (b) a Q residue at a position corresponding to position 50 of SEQ ID NO: 1; (c) a G residue at a position corresponding to position 71 of SEQ ID NO: 1; (d) a S residue at a position corresponding to position 72 of SEQ ID NO: 1; (e) a V residue at a position corresponding to position 73 of SEQ ID NO: 1; and (f) a S residue at a position corresponding to position 74 of SEQ ID NO: 1.

[0498] In some embodiments of the method: (a) the center sequence is GTAA and the first subunit comprises residues corresponding to residues 48, 50, 71, 72, 73, and 74 of any one of SEQ ID NOs: 360-389, (b) the center sequence is GTAG and the first subunit comprises residues corresponding to residues 48, 50, 71, 72, 73, and 74 of any one of SEQ ID NOs: 392-399, (c) the center sequence is GTAT and the first subunit comprises residues corresponding to residues 48, 50, 71, 72, 73, and 74 of any one of SEQ ID NOs: 402-433, (d) the center sequence is GTGA and the first subunit comprises residues corresponding to residues 48, 50, 71, 72, 73, and 74 of any one of SEQ ID NOs: 436-462, (e) the center sequence is GTGC and the first subunit comprises residues corresponding to residues 48, 50, 71, 72, 73, and 74 of any one of SEQ ID NOs: 465-495, (f) the center sequence is GTGG and the first subunit comprises residues corresponding to residues 48, 50, 71, 72, 73, and 74 of any one of SEQ ID NOs: 498-501, or (g) the center sequence is GTGT and the first subunit comprises residues corresponding to residues 48, 50, 71, 72, 73, and 74 of any one of SEQ ID NOs: 504-529.

[0499] Another aspect is an engineered I-CreI-derived meganuclease that binds and cleaves a recognition sequence comprising a center sequence selected from the group consisting of ACAA, ACAG, ACAT, ACGA, ACGC, ACGG, ACGT, ATAA, ATAG, ATAT, ATGA, ATGG, TTGG, GCAA, GCAT, GCGA, GCAG, TCAA, or TTAA, wherein said engineered meganuclease comprises a first subunit and a second subunit, wherein at least one of said first or second subunit comprises at least 75%, at least 80%, at least 85%, at least 88%, at least 90%, at least 92%, at least 94%, at least 96%, at least 97%, at least 98%, or at least 99% sequence identity to SEQ ID NO: 1 with the exception of an amino acid substitution at one or more positions corresponding to positions 48, 50, 71, 72, 73, and 74 of SEQ ID NO: 1.

[0500] In some embodiments, at least one of said first or second subunit comprises at least 85% sequence identity to SEQ ID NO: 1 with the exception of an amino acid substitution at one or more positions corresponding to positions 48, 50, 71, 72, 73, and 74 of SEQ ID NO: 1. Another aspect is a polynucleotide comprising a nucleic acid sequence encoding any engineered meganuclease described herein. In some embodiments, the polynucleotide an mRNA.

[0501] Another aspect is a recombinant DNA construct comprising a polynucleotide comprising a nucleic acid sequence encoding any engineered meganuclease described herein.

[0502] In some embodiments, the recombinant DNA construct encodes a recombinant virus comprising the polynucleotide. In some embodiments, the recombinant virus is a recombinant adenovirus, a recombinant lentivirus, a recombinant retrovirus, or a recombinant adeno-associated virus (AAV). In some embodiments, the recombinant virus is a recombinant AAV.

[0503] Another aspect is a recombinant virus comprising a polynucleotide comprising a nucleic acid sequence encoding any engineered meganuclease described herein. In some embodiments, the recombinant virus is a recombinant adenovirus, a recombinant lentivirus, a recombinant retrovirus, or a recombinant AAV. In some embodiments, the recombinant virus is a recombinant AAV.

[0504] Another aspect is a method for producing a genetically-modified eukaryotic cell having a disrupted target sequence in a chromosome of the genetically-modified eukaryotic cell, the method comprising: introducing into a eukaryotic cell a polynucleotide comprising a nucleic acid sequence encoding any engineered meganuclease described herein, wherein the engineered meganuclease is expressed in the eukaryotic cell; wherein the engineered meganuclease produces a cleavage site in the chromosome at a recognition sequence, and wherein the target sequence is disrupted by non-homologous end-joining at the cleavage site.

[0505] In some embodiments of the method, the nucleic acid is introduced into the eukaryotic cell by an mRNA or a recombinant virus. In some embodiments of the method, the eukaryotic cell is a mammalian cell. In some embodiments of the method, the eukaryotic cell is a human cell. In some embodiments of the method, the eukaryotic cell is a plant cell.

[0506] Another aspect is a method for producing a genetically-modified eukaryotic having a disrupted target sequence in a chromosome of the genetically-modified eukaryotic cell, the method comprising: introducing into a eukaryotic cell any engineered meganuclease described herein; wherein the engineered meganuclease produces a cleavage site in the chromosome at a recognition sequence, and wherein the target sequence is disrupted by non-homologous end-joining at the cleavage site.

[0507] In some embodiments of the method, the eukaryotic cell is a mammalian cell. In some embodiments of the method, the eukaryotic cell is a human cell. In some embodiments of the method the eukaryotic cell is a plant cell.

[0508] Another aspect is a method for producing a genetically-modified eukaryotic cell comprising an exogenous sequence of interest inserted into a chromosome of the genetically-modified eukaryotic cell, the method comprising introducing into a eukaryotic cell one or more polynucleotides comprising: (a) a first nucleic acid sequence encoding any engineered meganuclease described herein, wherein the engineered meganuclease is expressed in the eukaryotic cell; and (b) a second nucleic acid sequence comprising the sequence of interest; wherein the engineered meganuclease produces a cleavage site in the chromosome at a recognition sequence; and wherein the sequence of interest is inserted into the chromosome at the cleavage site.

[0509] In some embodiments of the method, the second nucleic acid sequence further comprises sequences homologous to sequences flanking the cleavage site and the sequence of interest is inserted at the cleavage site by homologous recombination. In some embodiments of the method, the first nucleic acid sequence is introduced into the eukaryotic cell by an mRNA or a recombinant virus. In some embodiments of the method, the second nucleic acid is introduced into the eukaryotic cell by a recombinant virus. In some embodiments of the method, the eukaryotic cell is a mammalian cell. In some embodiments of the method, the eukaryotic cell is a human cell. In some embodiments of the method, the eukaryotic cell is a plant cell.

[0510] Another aspect is a method for producing a genetically-modified eukaryotic cell comprising an exogenous sequence of interest inserted into a chromosome of the genetically modified eukaryotic cell, the method comprising: (a) introducing any engineered meganuclease described herein into a eukaryotic cell; and (b) introducing a polynucleotide comprising a nucleic acid sequence comprising the sequence of interest into the eukaryotic cell; wherein the engineered meganuclease produces a cleavage site in the chromosome at a recognition sequence; and wherein the sequence of interest is inserted into the chromosome at the cleavage site.

[0511] In some embodiments of the method, the polynucleotide further comprises sequences homologous to sequences flanking the cleavage site and the sequence of interest is inserted at the cleavage site by homologous recombination. In some embodiments of the method, the polynucleotide is introduced into the eukaryotic cell by a recombinant virus. In some embodiments of the method, the eukaryotic cell is a mammalian cell. In some embodiments of the method, the eukaryotic cell is a human cell. In some embodiments of the method, the eukaryotic cell is a plant cell.

[0512] Another aspect is a genetically-modified eukaryotic cell prepared by any method of preparing a genetically-modified cell described herein.

[0513] Another aspect is a pharmaceutical composition comprising a pharmaceutically-acceptable carrier and any engineered meganuclease described herein, or a polynucleotide comprising a nucleic acid sequence encoding any engineered meganuclease described herein.

[0514] In some embodiments, the polynucleotide is an mRNA. In some embodiments, the mRNA is encapsulated in a lipid nanoparticle. In some embodiments, the pharmaceutical composition comprises a recombinant DNA construct comprising the polynucleotide. In some embodiments, the pharmaceutical composition comprises a recombinant virus comprising the polynucleotide. In some embodiments, the recombinant virus is a recombinant AAV.

[0515] These and other aspects and embodiments of the invention will be apparent to one of ordinary skill in the art from the following detailed description of the invention, figures and appended claims.

### BRIEF DESCRIPTION OF THE FIGURES

[0516] FIG. 1. Schematic illustration of a 22 base pair wild type I-CreI recognition sequence. The bases of each DNA half-site are numbered −1 through −9. The four base pairs one each strand that comprise the center sequence are numbered +1 to +4.

[0517] FIG. 2. Engineered meganucleases described herein comprise two subunits. The first subunit comprises a first hypervariable (HVR1) region which binds to a first recognition half-site of the recognition sequence. Similarly, the second subunit comprises a second hypervariable (HVR2) region which binds to a second recognition half-site of the recognition sequence. In embodiments where the recombinant meganuclease is a single-chain meganuclease, the first subunit comprising the HVR1 region can be positioned as either the N-terminal or C-terminal subunit. Likewise, the second subunit comprising the HVR2 region can be positioned as either the N-terminal or C-terminal subunit.

[0518] FIG. 3. Schematic of reporter assay in CHO cells for evaluating recombinant meganucleases targeting test recognition sequences having different four base pair center sequences. For the recombinant meganucleases described herein, a CHO cell line was produced in which a reporter cassette was integrated stably into the genome of the cell. The reporter cassette comprised, in 5′ to 3′ order: an SV40 Early Promoter; the 5′ ⅔ of the GFP gene; the recognition sequence for an engineered meganuclease described herein (e.g., LOX 3-4; SEQ ID NO: 6); the recognition sequence for the CHO-23/24 meganuclease (WO/2012/167192); and the 3′ ⅔ of the GFP gene. Cells stably transfected with this cassette do not express GFP in the absence of a DNA break-inducing agent. Meganucleases are introduced by transduction of an mRNA encoding each meganuclease. When a DNA break is induced at either of the meganuclease recognition sequences, the duplicated regions of the GFP gene recombine with one another to produce a functional GFP gene. The percentage of GFP-expressing cells can then be determined by flow cytometry as an indirect measure of the frequency of genome cleavage by the meganucleases.

[0519] FIG. 4. Crystal structure of a modified I-CreI derived meganuclease (light color) overlaid with a wild type I-CreI meganuclease (dark color). The variant meganuclease has modified residues Q50R, G71S, S72G, and V73R, which increases the variant meganuclease cleavage activity of a recognition sequence comprising the four base pair center sequence GCAG. The nucleotide G from the variant I-CreI meganuclease and the nucleotide A from the wild type I-CreI meganuclease are shown. Further presented is the overlaid alignment of positions 47, 48, 49, 50, 71, 72, and 73, which are arranged around the nucleotides of the center four base pair center sequence. Lastly, the small spheres depict the overlaid metal co-factors which are thought to be coordinated, at least in part, by the residues 48, 50, 71, 72, 73, and 74.

### BRIEF DESCRIPTION OF THE SEQUENCES

[0520] SEQ ID NO: 1 sets forth the amino acid sequence of wild-type I-CreI.

[0521] SEQ ID NO: 2 sets forth the amino acid sequence of the LAGLIDADG motif.

[0522] SEQ ID NO: 3 sets forth the nucleic acid sequence of the wild-type I-CreI recognition sequence (sense).

[0523] SEQ ID NO: 4 sets forth the nucleic acid sequence of the wild-type I-CreI recognition sequence (antisense).

[0524] SEQ ID NO: 5 sets forth the nucleic acid sequence of the center sequence of the wild-type I-CreI recognition sequence.

[0525] SEQ ID NO: 6 sets forth the nucleic acid sequence of the LOX 3-4 recognition sequence (sense).

[0526] SEQ ID NO: 7 sets forth the nucleic acid sequence of the LOX 3-4 recognition sequence (antisense).

[0527] SEQ ID NO: 8 sets forth the amino acid sequence of the LOX 3-4x.109 meganuclease.

[0528] SEQ ID NO: 9 sets forth the nucleic acid of the LOX 3-4 recognition sequence (sense) with an ACAA center sequence.

[0529] SEQ ID NO: 10 sets forth the nucleic acid of the LOX 3-4 recognition sequence (antisense) with an ACAA center sequence.

[0530] SEQ ID NO: 11 sets forth the amino acid sequence of the LOX 3-4m.680 meganuclease.

[0531] SEQ ID NO: 12 sets forth the amino acid sequence of the LOX 3-4m.683 meganuclease.

[0532] SEQ ID NO: 13 sets forth the amino acid sequence of the LOX 3-4m.684 meganuclease.

[0533] SEQ ID NO: 14 sets forth the amino acid sequence of the LOX 3-4m.691 meganuclease.

[0534] SEQ ID NO: 15 sets forth the amino acid sequence of the LOX 3-4m.693 meganuclease.

[0535] SEQ ID NO: 16 sets forth the amino acid sequence of the LOX 3-4m.701 meganuclease.

[0536] SEQ ID NO: 17 sets forth the amino acid sequence of the LOX 3-4m.708 meganuclease.

[0537] SEQ ID NO: 18 sets forth the amino acid sequence of the LOX 3-4m.714 meganuclease.

[0538] SEQ ID NO: 19 sets forth the amino acid sequence of the LOX 3-4m.731 meganuclease.

[0539] SEQ ID NO: 20 sets forth the amino acid sequence of the LOX 3-4m.739 meganuclease.

[0540] SEQ ID NO: 21 sets forth the amino acid sequence of the LOX 3-4m.741 meganuclease.

[0541] SEQ ID NO: 22 sets forth the amino acid sequence of the LOX 3-4m.742 meganuclease.

[0542] SEQ ID NO: 23 sets forth the amino acid sequence of the LOX 3-4m.743 meganuclease.

[0543] SEQ ID NO: 24 sets forth the amino acid sequence of the LOX 3-4m.744 meganuclease.

[0544] SEQ ID NO: 25 sets forth the amino acid sequence of the LOX 3-4m.747 meganuclease.

[0545] SEQ ID NO: 26 sets forth the amino acid sequence of the LOX 3-4m.750 meganuclease.

[0546] SEQ ID NO: 27 sets forth the amino acid sequence of the LOX 3-4m.756 meganuclease.

[0547] SEQ ID NO: 28 sets forth the amino acid sequence of the LOX 3-4m.757 meganuclease.

[0548] SEQ ID NO: 29 sets forth the amino acid sequence of the LOX 3-4m.759 meganuclease.

[0549] SEQ ID NO: 30 sets forth the amino acid sequence of the LOX 3-4m.762 meganuclease.

[0550] SEQ ID NO: 31 sets forth the amino acid sequence of the LOX 3-4m.765 meganuclease.

[0551] SEQ ID NO: 32 sets forth the amino acid sequence of the LOX 3-4m.770 meganuclease.

[0552] SEQ ID NO: 33 sets forth the amino acid sequence of the LOX 3-4m.771 meganuclease.

[0553] SEQ ID NO: 34 sets forth the nucleic acid of the LOX 3-4 recognition sequence (sense) with an ACAG center sequence.

[0554] SEQ ID NO: 35 sets forth the nucleic acid of the LOX 3-4 recognition sequence (antisense) with an ACAG center sequence.

[0555] SEQ ID NO: 36 sets forth the amino acid sequence of the LOX3-4m.775 meganuclease.

[0556] SEQ ID NO: 37 sets forth the amino acid sequence of the LOX3-4m.776 meganuclease.

[0557] SEQ ID NO: 38 sets forth the amino acid sequence of the LOX3-4m.785 meganuclease.

[0558] SEQ ID NO: 39 sets forth the amino acid sequence of the LOX3-4m.788 meganuclease.

[0559] SEQ ID NO: 40 sets forth the amino acid sequence of the LOX3-4m.815 meganuclease.

[0560] SEQ ID NO: 41 sets forth the amino acid sequence of the LOX3-4m.831 meganuclease.

[0561] SEQ ID NO: 42 sets forth the amino acid sequence of the LOX3-4m.856 meganuclease.

[0562] SEQ ID NO: 43 sets forth the amino acid sequence of the LOX3-4m.863 meganuclease.

[0563] SEQ ID NO: 44 sets forth the nucleic acid of the LOX 3-4 recognition sequence (sense) with an ACAT center sequence.

[0564] SEQ ID NO: 45 sets forth the nucleic acid of the LOX 3-4 recognition sequence (antisense) with an ACAT center sequence.

[0565] SEQ ID NO: 46 sets forth the amino acid sequence of the LOX3-4m.869 meganuclease.

[0566] SEQ ID NO: 47 sets forth the amino acid sequence of the LOX3-4m.873 meganuclease.

[0567] SEQ ID NO: 48 sets forth the amino acid sequence of the LOX3-4m.877 meganuclease.

[0568] SEQ ID NO: 49 sets forth the amino acid sequence of the LOX3-4m.883 meganuclease.

[0569] SEQ ID NO: 50 sets forth the amino acid sequence of the LOX3-4m.885 meganuclease.

[0570] SEQ ID NO: 51 sets forth the amino acid sequence of the LOX3-4m.886 meganuclease.

[0571] SEQ ID NO: 52 sets forth the amino acid sequence of the LOX3-4m.893 meganuclease.

[0572] SEQ ID NO: 53 sets forth the amino acid sequence of the LOX3-4m.901 meganuclease.

[0573] SEQ ID NO: 54 sets forth the amino acid sequence of the LOX3-4m.910 meganuclease.

[0574] SEQ ID NO: 55 sets forth the amino acid sequence of the LOX3-4m.917 meganuclease.

[0575] SEQ ID NO: 56 sets forth the amino acid sequence of the LOX3-4m.919 meganuclease.

[0576] SEQ ID NO: 57 sets forth the amino acid sequence of the LOX3-4m.922 meganuclease.

[0577] SEQ ID NO: 58 sets forth the amino acid sequence of the LOX3-4m.925 meganuclease.

[0578] SEQ ID NO: 59 sets forth the amino acid sequence of the LOX3-4m.929 meganuclease.

[0579] SEQ ID NO: 60 sets forth the amino acid sequence of the LOX3-4m.930 meganuclease.

[0580] SEQ ID NO: 61 sets forth the amino acid sequence of the LOX3-4m.933 meganuclease.

[0581] SEQ ID NO: 62 sets forth the amino acid sequence of the LOX3-4m.937 meganuclease.

[0582] SEQ ID NO: 63 sets forth the amino acid sequence of the LOX3-4m.941 meganuclease.

[0583] SEQ ID NO: 64 sets forth the amino acid sequence of the LOX3-4m.942 meganuclease.

[0584] SEQ ID NO: 65 sets forth the amino acid sequence of the LOX3-4m.945 meganuclease.

[0585] SEQ ID NO: 66 sets forth the amino acid sequence of the LOX3-4m.949 meganuclease.

[0586] SEQ ID NO: 67 sets forth the amino acid sequence of the LOX3-4m.950 meganuclease.

[0587] SEQ ID NO: 68 sets forth the nucleic acid of the LOX 3-4 recognition sequence (sense) with an ACGA center sequence.

[0588] SEQ ID NO: 69 sets forth the nucleic acid of the LOX 3-4 recognition sequence (antisense) with an ACGA center sequence.

[0589] SEQ ID NO: 70 sets forth the amino acid sequence of the LOX 3-4m.956 meganuclease.

[0590] SEQ ID NO: 71 sets forth the amino acid sequence of the LOX 3-4m.961 meganuclease.

[0591] SEQ ID NO: 72 sets forth the amino acid sequence of the LOX 3-4m.962 meganuclease.

[0592] SEQ ID NO: 73 sets forth the amino acid sequence of the LOX 3-4m.963 meganuclease.

[0593] SEQ ID NO: 74 sets forth the amino acid sequence of the LOX 3-4m.969 meganuclease.

[0594] SEQ ID NO: 75 sets forth the amino acid sequence of the LOX 3-4m.971 meganuclease.

[0595] SEQ ID NO: 76 sets forth the amino acid sequence of the LOX 3-4m.977 meganuclease.

[0596] SEQ ID NO: 77 sets forth the amino acid sequence of the LOX 3-4m.982 meganuclease.

[0597] SEQ ID NO: 78 sets forth the amino acid sequence of the LOX 3-4m.986 meganuclease.

[0598] SEQ ID NO: 79 sets forth the amino acid sequence of the LOX 3-4m.993 meganuclease.

[0599] SEQ ID NO: 80 sets forth the amino acid sequence of the LOX 3-4m.994 meganuclease.

[0600] SEQ ID NO: 81 sets forth the amino acid sequence of the LOX 3-4m.1001 meganuclease.

[0601] SEQ ID NO: 82 sets forth the amino acid sequence of the LOX 3-4m.1013 meganuclease.

[0602] SEQ ID NO: 83 sets forth the amino acid sequence of the LOX 3-4m.1017 meganuclease.

[0603] SEQ ID NO: 84 sets forth the amino acid sequence of the LOX 3-4m.1018 meganuclease.

[0604] SEQ ID NO: 85 sets forth the amino acid sequence of the LOX 3-4m.1021 meganuclease.

[0605] SEQ ID NO: 86 sets forth the amino acid sequence of the LOX 3-4m.1029 meganuclease.

[0606] SEQ ID NO: 87 sets forth the amino acid sequence of the LOX 3-4m.1036 meganuclease.

[0607] SEQ ID NO: 88 sets forth the amino acid sequence of the LOX 3-4m.1041 meganuclease.

[0608] SEQ ID NO: 89 sets forth the amino acid sequence of the LOX 3-4m.1044 meganuclease.

[0609] SEQ ID NO: 90 sets forth the nucleic acid of the LOX 3-4 recognition sequence (sense) with an ACGC center sequence.

[0610] SEQ ID NO: 91 sets forth the nucleic acid of the LOX 3-4 recognition sequence (antisense) with an ACGC center sequence.

[0611] SEQ ID NO: 92 sets forth the amino acid sequence of the LOX 3-4m.1049 meganuclease.

[0612] SEQ ID NO: 93 sets forth the amino acid sequence of the LOX 3-4m.1050 meganuclease.

[0613] SEQ ID NO: 94 sets forth the amino acid sequence of the LOX 3-4m.1052 meganuclease.

[0614] SEQ ID NO: 95 sets forth the amino acid sequence of the LOX 3-4m.1068 meganuclease.

[0615] SEQ ID NO: 96 sets forth the amino acid sequence of the LOX 3-4m.1069 meganuclease.

[0616] SEQ ID NO: 97 sets forth the amino acid sequence of the LOX 3-4m.1074 meganuclease.

[0617] SEQ ID NO: 98 sets forth the amino acid sequence of the LOX 3-4m.1085 meganuclease.

[0618] SEQ ID NO: 99 sets forth the amino acid sequence of the LOX 3-4m.1093 meganuclease.

[0619] SEQ ID NO: 100 sets forth the amino acid sequence of the LOX 3-4m.1095 meganuclease.

[0620] SEQ ID NO: 101 sets forth the amino acid sequence of the LOX 3-4m.1098 meganuclease.

[0621] SEQ ID NO: 102 sets forth the amino acid sequence of the LOX 3-4m.1100 meganuclease.

[0622] SEQ ID NO: 103 sets forth the amino acid sequence of the LOX 3-4m.1101 meganuclease.

[0623] SEQ ID NO: 104 sets forth the amino acid sequence of the LOX 3-4m.1107 meganuclease.

[0624] SEQ ID NO: 105 sets forth the amino acid sequence of the LOX 3-4m.1109 meganuclease.

[0625] SEQ ID NO: 106 sets forth the amino acid sequence of the LOX 3-4m.1111 meganuclease.

[0626] SEQ ID NO: 107 sets forth the amino acid sequence of the LOX 3-4m.1113 meganuclease.

[0627] SEQ ID NO: 108 sets forth the amino acid sequence of the LOX 3-4m.1116 meganuclease.

[0628] SEQ ID NO: 109 sets forth the amino acid sequence of the LOX 3-4m.1117 meganuclease.

[0629] SEQ ID NO: 110 sets forth the amino acid sequence of the LOX 3-4m.1118 meganuclease.

[0630] SEQ ID NO: 111 sets forth the amino acid sequence of the LOX 3-4m.1123 meganuclease.

[0631] SEQ ID NO: 112 sets forth the amino acid sequence of the LOX 3-4m.1125 meganuclease.

[0632] SEQ ID NO: 113 sets forth the amino acid sequence of the LOX 3-4m.1126 meganuclease.

[0633] SEQ ID NO: 114 sets forth the amino acid sequence of the LOX 3-4m.1127 meganuclease.

[0634] SEQ ID NO: 115 sets forth the amino acid sequence of the LOX 3-4m.1129 meganuclease.

[0635] SEQ ID NO: 116 sets forth the amino acid sequence of the LOX 3-4m.1131 meganuclease.

[0636] SEQ ID NO: 117 sets forth the amino acid sequence of the LOX 3-4m.1133 meganuclease.

[0637] SEQ ID NO: 118 sets forth the amino acid sequence of the LOX 3-4m.1137 meganuclease.

[0638] SEQ ID NO: 119 sets forth the nucleic acid of the LOX 3-4 recognition sequence (sense) with an ACGG center sequence.

[0639] SEQ ID NO: 120 sets forth the nucleic acid of the LOX 3-4 recognition sequence (antisense) with an ACGG center sequence.

[0640] SEQ ID NO: 121 sets forth the amino acid sequence of the LOX 3-4m.1876 meganuclease.

[0641] SEQ ID NO: 122 sets forth the amino acid sequence of the LOX 3-4m.1894 meganuclease.

[0642] SEQ ID NO: 123 sets forth the amino acid sequence of the LOX 3-4m.1898 meganuclease.

[0643] SEQ ID NO: 124 sets forth the amino acid sequence of the LOX 3-4m.1904 meganuclease.

[0644] SEQ ID NO: 125 sets forth the amino acid sequence of the LOX 3-4m.1910 meganuclease.

[0645] SEQ ID NO: 126 sets forth the amino acid sequence of the LOX 3-4m.1914 meganuclease.

[0646] SEQ ID NO: 127 sets forth the amino acid sequence of the LOX 3-4m.1930 meganuclease.

[0647] SEQ ID NO: 128 sets forth the amino acid sequence of the LOX 3-4m.1938 meganuclease.

[0648] SEQ ID NO: 129 sets forth the amino acid sequence of the LOX 3-4m.1941 meganuclease.

[0649] SEQ ID NO: 130 sets forth the amino acid sequence of the LOX 3-4m.1944 meganuclease.

[0650] SEQ ID NO: 131 sets forth the amino acid sequence of the LOX 3-4m.1946 meganuclease.

[0651] SEQ ID NO: 132 sets forth the amino acid sequence of the LOX 3-4m.1947 meganuclease.

[0652] SEQ ID NO: 133 sets forth the amino acid sequence of the LOX 3-4m.1950 meganuclease.

[0653] SEQ ID NO: 134 sets forth the amino acid sequence of the LOX 3-4m.1952 meganuclease.

[0654] SEQ ID NO: 135 sets forth the amino acid sequence of the LOX 3-4m.1960 meganuclease.

[0655] SEQ ID NO: 136 sets forth the nucleic acid of the LOX 3-4 recognition sequence (sense) with an ACGT center sequence.

[0656] SEQ ID NO: 137 sets forth the nucleic acid of the LOX 3-4 recognition sequence (antisense) with an ACGT center sequence.

[0657] SEQ ID NO: 138 sets forth the amino acid sequence of the LOX 3-4m.1145 meganuclease.

[0658] SEQ ID NO: 139 sets forth the amino acid sequence of the LOX 3-4m.1149 meganuclease.

[0659] SEQ ID NO: 140 sets forth the amino acid sequence of the LOX 3-4m.1152 meganuclease.

[0660] SEQ ID NO: 141 sets forth the amino acid sequence of the LOX 3-4m.1153 meganuclease.

[0661] SEQ ID NO: 142 sets forth the amino acid sequence of the LOX 3-4m.1157 meganuclease.

[0662] SEQ ID NO: 143 sets forth the amino acid sequence of the LOX 3-4m.1158 meganuclease.

[0663] SEQ ID NO: 144 sets forth the amino acid sequence of the LOX 3-4m.1176 meganuclease.

[0664] SEQ ID NO: 145 sets forth the amino acid sequence of the LOX 3-4m.1191 meganuclease.

[0665] SEQ ID NO: 146 sets forth the amino acid sequence of the LOX 3-4m.1198 meganuclease.

[0666] SEQ ID NO: 147 sets forth the amino acid sequence of the LOX 3-4m.1201 meganuclease.

[0667] SEQ ID NO: 148 sets forth the amino acid sequence of the LOX 3-4m.1205 meganuclease.

[0668] SEQ ID NO: 149 sets forth the amino acid sequence of the LOX 3-4m.1206 meganuclease.

[0669] SEQ ID NO: 150 sets forth the amino acid sequence of the LOX 3-4m.1208 meganuclease.

[0670] SEQ ID NO: 151 sets forth the amino acid sequence of the LOX 3-4m.1212 meganuclease.

[0671] SEQ ID NO: 152 sets forth the amino acid sequence of the LOX 3-4m.1218 meganuclease.

[0672] SEQ ID NO: 153 sets forth the amino acid sequence of the LOX 3-4m.1224 meganuclease.

[0673] SEQ ID NO: 154 sets forth the amino acid sequence of the LOX 3-4m.1225 meganuclease.

[0674] SEQ ID NO: 155 sets forth the amino acid sequence of the LOX 3-4m.1226 meganuclease.

[0675] SEQ ID NO: 156 sets forth the amino acid sequence of the LOX 3-4m.1227 meganuclease.

[0676] SEQ ID NO: 157 sets forth the nucleic acid of the LOX 3-4 recognition sequence (sense) with an ATAA center sequence.

[0677] SEQ ID NO: 158 sets forth the nucleic acid of the LOX 3-4 recognition sequence (antisense) with an ATAA center sequence.

[0678] SEQ ID NO: 159 sets forth the amino acid sequence of the LOX 3-4m.1232 meganuclease.

[0679] SEQ ID NO: 160 sets forth the amino acid sequence of the LOX 3-4m.1235 meganuclease.

[0680] SEQ ID NO: 161 sets forth the amino acid sequence of the LOX 3-4m.1236 meganuclease.

[0681] SEQ ID NO: 162 sets forth the amino acid sequence of the LOX 3-4m.1237 meganuclease.

[0682] SEQ ID NO: 163 sets forth the amino acid sequence of the LOX 3-4m.1240 meganuclease.

[0683] SEQ ID NO: 164 sets forth the amino acid sequence of the LOX 3-4m.1250 meganuclease.

[0684] SEQ ID NO: 165 sets forth the amino acid sequence of the LOX 3-4m.1253 meganuclease.

[0685] SEQ ID NO: 166 sets forth the amino acid sequence of the LOX 3-4m.1255 meganuclease.

[0686] SEQ ID NO: 167 sets forth the amino acid sequence of the LOX 3-4m.1256 meganuclease.

[0687] SEQ ID NO: 168 sets forth the amino acid sequence of the LOX 3-4m.1260 meganuclease.

[0688] SEQ ID NO: 169 sets forth the amino acid sequence of the LOX 3-4m.1261 meganuclease.

[0689] SEQ ID NO: 170 sets forth the amino acid sequence of the LOX 3-4m.1262 meganuclease.

[0690] SEQ ID NO: 171 sets forth the amino acid sequence of the LOX 3-4m.1268 meganuclease.

[0691] SEQ ID NO: 172 sets forth the amino acid sequence of the LOX 3-4m.1269 meganuclease.

[0692] SEQ ID NO: 173 sets forth the amino acid sequence of the LOX 3-4m.1278 meganuclease.

[0693] SEQ ID NO: 174 sets forth the amino acid sequence of the LOX 3-4m.1284 meganuclease.

[0694] SEQ ID NO: 175 sets forth the amino acid sequence of the LOX 3-4m.1293 meganuclease.

[0695] SEQ ID NO: 176 sets forth the amino acid sequence of the LOX 3-4m.1300 meganuclease.

[0696] SEQ ID NO: 177 sets forth the amino acid sequence of the LOX 3-4m.1301 meganuclease.

[0697] SEQ ID NO: 178 sets forth the amino acid sequence of the LOX 3-4m.1308 meganuclease.

[0698] SEQ ID NO: 179 sets forth the amino acid sequence of the LOX 3-4m.1309 meganuclease.

[0699] SEQ ID NO: 180 sets forth the amino acid sequence of the LOX 3-4m.1311 meganuclease.

[0700] SEQ ID NO: 181 sets forth the amino acid sequence of the LOX 3-4m.1317 meganuclease.

[0701] SEQ ID NO: 182 sets forth the amino acid sequence of the LOX 3-4m.1319 meganuclease.

[0702] SEQ ID NO: 183 sets forth the amino acid sequence of the LOX 3-4m.1322 meganuclease.

[0703] SEQ ID NO: 184 sets forth the nucleic acid of the LOX 3-4 recognition sequence (sense) with an ATAG center sequence.

[0704] SEQ ID NO: 185 sets forth the nucleic acid of the LOX 3-4 recognition sequence (antisense) with an ATAG center sequence.

[0705] SEQ ID NO: 186 sets forth the amino acid sequence of the LOX 3-4m.1329 meganuclease.

[0706] SEQ ID NO: 187 sets forth the amino acid sequence of the LOX 3-4m.1338 meganuclease.

[0707] SEQ ID NO: 188 sets forth the amino acid sequence of the LOX 3-4m.1343 meganuclease.

[0708] SEQ ID NO: 189 sets forth the amino acid sequence of the LOX 3-4m.1345 meganuclease.

[0709] SEQ ID NO: 190 sets forth the amino acid sequence of the LOX 3-4m.1347 meganuclease.

[0710] SEQ ID NO: 191 sets forth the amino acid sequence of the LOX 3-4m.1353 meganuclease.

[0711] SEQ ID NO: 192 sets forth the amino acid sequence of the LOX 3-4m.1361 meganuclease.

[0712] SEQ ID NO: 193 sets forth the amino acid sequence of the LOX 3-4m.1369 meganuclease.

[0713] SEQ ID NO: 194 sets forth the amino acid sequence of the LOX 3-4m.1391 meganuclease.

[0714] SEQ ID NO: 195 sets forth the amino acid sequence of the LOX 3-4m.1392 meganuclease.

[0715] SEQ ID NO: 196 sets forth the amino acid sequence of the LOX 3-4m.1394 meganuclease.

[0716] SEQ ID NO: 197 sets forth the amino acid sequence of the LOX 3-4m.1396 meganuclease.

[0717] SEQ ID NO: 198 sets forth the amino acid sequence of the LOX 3-4m.1405 meganuclease.

[0718] SEQ ID NO: 199 sets forth the amino acid sequence of the LOX 3-4m.1415 meganuclease.

[0719] SEQ ID NO: 200 sets forth the nucleic acid of the LOX 3-4 recognition sequence (sense) with an ATAT center sequence.

[0720] SEQ ID NO: 201 sets forth the nucleic acid of the LOX 3-4 recognition sequence (antisense) with an ATAT center sequence.

[0721] SEQ ID NO: 202 sets forth the amino acid sequence of the LOX 3-4m.2244 meganuclease.

[0722] SEQ ID NO: 203 sets forth the amino acid sequence of the LOX 3-4m.2248 meganuclease.

[0723] SEQ ID NO: 204 sets forth the amino acid sequence of the LOX 3-4m.2254 meganuclease.

[0724] SEQ ID NO: 205 sets forth the amino acid sequence of the LOX 3-4m.2263 meganuclease.

[0725] SEQ ID NO: 206 sets forth the amino acid sequence of the LOX 3-4m.2273 meganuclease.

[0726] SEQ ID NO: 207 sets forth the amino acid sequence of the LOX 3-4m.2274 meganuclease.

[0727] SEQ ID NO: 208 sets forth the amino acid sequence of the LOX 3-4m.2313 meganuclease.

[0728] SEQ ID NO: 209 sets forth the amino acid sequence of the LOX 3-4m.2316 meganuclease.

[0729] SEQ ID NO: 210 sets forth the amino acid sequence of the LOX 3-4m.2327 meganuclease.

[0730] SEQ ID NO: 211 sets forth the amino acid sequence of the LOX 3-4m.2318 meganuclease.

[0731] SEQ ID NO: 212 sets forth the amino acid sequence of the LOX 3-4m.2319 meganuclease.

[0732] SEQ ID NO: 213 sets forth the amino acid sequence of the LOX 3-4m.2320 meganuclease.

[0733] SEQ ID NO: 214 sets forth the amino acid sequence of the LOX 3-4m.2322 meganuclease.

[0734] SEQ ID NO: 215 sets forth the amino acid sequence of the LOX 3-4m.2324 meganuclease.

[0735] SEQ ID NO: 216 sets forth the amino acid sequence of the LOX 3-4m.2326 meganuclease.

[0736] SEQ ID NO: 217 sets forth the amino acid sequence of the LOX 3-4m.2329 meganuclease.

[0737] SEQ ID NO: 218 sets forth the amino acid sequence of the LOX 3-4m.2330 meganuclease.

[0738] SEQ ID NO: 219 sets forth the amino acid sequence of the LOX 3-4m.2258 meganuclease.

[0739] SEQ ID NO: 220 sets forth the nucleic acid of the LOX 3-4 recognition sequence (sense) with an ATGA center sequence.

[0740] SEQ ID NO: 221 sets forth the nucleic acid of the LOX 3-4 recognition sequence (antisense) with an ATGA center sequence.

[0741] SEQ ID NO: 222 sets forth the amino acid sequence of the LOX3-4m.1417 meganuclease.

[0742] SEQ ID NO: 223 sets forth the amino acid sequence of the LOX3-4m.1421 meganuclease.

[0743] SEQ ID NO: 224 sets forth the amino acid sequence of the LOX3-4m.1432 meganuclease.

[0744] SEQ ID NO: 225 sets forth the amino acid sequence of the LOX3-4m.1436 meganuclease.

[0745] SEQ ID NO: 226 sets forth the amino acid sequence of the LOX3-4m.1437 meganuclease.

[0746] SEQ ID NO: 227 sets forth the amino acid sequence of the LOX3-4m.1441 meganuclease.

[0747] SEQ ID NO: 228 sets forth the amino acid sequence of the LOX3-4m.1450 meganuclease.

[0748] SEQ ID NO: 229 sets forth the amino acid sequence of the LOX3-4m.1451 meganuclease.

[0749] SEQ ID NO: 230 sets forth the amino acid sequence of the LOX3-4m.1453 meganuclease.

[0750] SEQ ID NO: 231 sets forth the amino acid sequence of the LOX3-4m.1468 meganuclease.

[0751] SEQ ID NO: 232 sets forth the amino acid sequence of the LOX3-4m.1469 meganuclease.

[0752] SEQ ID NO: 233 sets forth the amino acid sequence of the LOX3-4m.1477 meganuclease.

[0753] SEQ ID NO: 234 sets forth the amino acid sequence of the LOX3-4m.1478 meganuclease.

[0754] SEQ ID NO: 235 sets forth the amino acid sequence of the LOX3-4m.1485 meganuclease.

[0755] SEQ ID NO: 236 sets forth the amino acid sequence of the LOX3-4m.1486 meganuclease.

[0756] SEQ ID NO: 237 sets forth the amino acid sequence of the LOX3-4m.1488 meganuclease.

[0757] SEQ ID NO: 238 sets forth the amino acid sequence of the LOX3-4m.1491 meganuclease.

[0758] SEQ ID NO: 239 sets forth the amino acid sequence of the LOX3-4m.1500 meganuclease.

[0759] SEQ ID NO: 240 sets forth the amino acid sequence of the LOX3-4m.1501 meganuclease.

[0760] SEQ ID NO: 241 sets forth the amino acid sequence of the LOX3-4m.1502 meganuclease.

[0761] SEQ ID NO: 242 sets forth the amino acid sequence of the LOX3-4m.1505 meganuclease.

[0762] SEQ ID NO: 243 sets forth the amino acid sequence of the LOX3-4m.1506 meganuclease.

[0763] SEQ ID NO: 244 sets forth the nucleic acid sequence of the ATGG LOX 3-4 recognition sequence (sense).

[0764] SEQ ID NO: 245 sets forth the nucleic acid sequence of the ATGG LOX 3-4 recognition sequence (antisense).

[0765] SEQ ID NO: 246 sets forth the amino acid sequence of the LOX 3-4m.1508 meganuclease.

[0766] SEQ ID NO: 247 sets forth the amino acid sequence of the LOX 3-4m.1515 meganuclease.

[0767] SEQ ID NO: 248 sets forth the nucleic acid of the LOX 3-4 recognition sequence (sense) with a TTGG center sequence.

[0768] SEQ ID NO: 249 sets forth the nucleic acid of the LOX 3-4 recognition sequence (antisense) with a TTGG center sequence.

[0769] SEQ ID NO: 250 sets forth the amino acid sequence of the LOX 3-4m.1970 meganuclease.

[0770] SEQ ID NO: 251 sets forth the amino acid sequence of the LOX 3-4m.1973 meganuclease.

[0771] SEQ ID NO: 252 sets forth the amino acid sequence of the LOX 3-4m.1974 meganuclease.

[0772] SEQ ID NO: 253 sets forth the amino acid sequence of the LOX 3-4m.1975 meganuclease.

[0773] SEQ ID NO: 254 sets forth the amino acid sequence of the LOX 3-4m.1979 meganuclease.

[0774] SEQ ID NO: 255 sets forth the amino acid sequence of the LOX 3-4m.1980 meganuclease.

[0775] SEQ ID NO: 256 sets forth the amino acid sequence of the LOX 3-4m.1981 meganuclease.

[0776] SEQ ID NO: 257 sets forth the amino acid sequence of the LOX 3-4m.1982 meganuclease.

[0777] SEQ ID NO: 258 sets forth the amino acid sequence of the LOX 3-4m.1986 meganuclease.

[0778] SEQ ID NO: 259 sets forth the amino acid sequence of the LOX 3-4m.1995 meganuclease.

[0779] SEQ ID NO: 260 sets forth the amino acid sequence of the LOX 3-4m.1997 meganuclease.

[0780] SEQ ID NO: 261 sets forth the amino acid sequence of the LOX 3-4m.2045 meganuclease.

[0781] SEQ ID NO: 262 sets forth the amino acid sequence of the LOX 3-4m.2050 meganuclease.

[0782] SEQ ID NO: 263 sets forth the amino acid sequence of the LOX 3-4m.2051 meganuclease.

[0783] SEQ ID NO: 264 sets forth the amino acid sequence of the LOX 3-4m.2052 meganuclease.

[0784] SEQ ID NO: 265 sets forth the amino acid sequence of the LOX 3-4m.2053 meganuclease.

[0785] SEQ ID NO: 266 sets forth the amino acid sequence of the LOX 3-4m.2059 meganuclease.

[0786] SEQ ID NO: 267 sets forth the nucleic acid of the LOX 3-4 recognition sequence (sense) with a GCAA center sequence.

[0787] SEQ ID NO: 268 sets forth the nucleic acid of the LOX 3-4 recognition sequence (antisense) with a GCAA center sequence.

[0788] SEQ ID NO: 269 sets forth the amino acid sequence of the LOX 3-4m.1784 meganuclease.

[0789] SEQ ID NO: 270 sets forth the amino acid sequence of the LOX 3-4m.1785 meganuclease.

[0790] SEQ ID NO: 271 sets forth the amino acid sequence of the LOX 3-4m.1787 meganuclease.

[0791] SEQ ID NO: 272 sets forth the amino acid sequence of the LOX 3-4m.1789 meganuclease.

[0792] SEQ ID NO: 273 sets forth the amino acid sequence of the LOX 3-4m.1798 meganuclease.

[0793] SEQ ID NO: 274 sets forth the amino acid sequence of the LOX 3-4m.1805 meganuclease.

[0794] SEQ ID NO: 275 sets forth the amino acid sequence of the LOX 3-4m.1809 meganuclease.

[0795] SEQ ID NO: 276 sets forth the amino acid sequence of the LOX 3-4m.1812 meganuclease.

[0796] SEQ ID NO: 277 sets forth the amino acid sequence of the LOX 3-4m.1814 meganuclease.

[0797] SEQ ID NO: 278 sets forth the amino acid sequence of the LOX 3-4m.1820 meganuclease.

[0798] SEQ ID NO: 279 sets forth the amino acid sequence of the LOX 3-4m.1827 meganuclease.

[0799] SEQ ID NO: 280 sets forth the amino acid sequence of the LOX 3-4m.1836 meganuclease.

[0800] SEQ ID NO: 281 sets forth the amino acid sequence of the LOX 3-4m.1837 meganuclease.

[0801] SEQ ID NO: 282 sets forth the amino acid sequence of the LOX 3-4m.1838 meganuclease.

[0802] SEQ ID NO: 283 sets forth the amino acid sequence of the LOX 3-4m.1846 meganuclease.

[0803] SEQ ID NO: 284 sets forth the amino acid sequence of the LOX 3-4m.1853 meganuclease.

[0804] SEQ ID NO: 285 sets forth the amino acid sequence of the LOX 3-4m.1854 meganuclease.

[0805] SEQ ID NO: 286 sets forth the amino acid sequence of the LOX 3-4m.1858 meganuclease.

[0806] SEQ ID NO: 287 sets forth the amino acid sequence of the LOX 3-4m.1862 meganuclease.

[0807] SEQ ID NO: 288 sets forth the amino acid sequence of the LOX 3-4m.1868 meganuclease.

[0808] SEQ ID NO: 289 sets forth the amino acid sequence of the LOX 3-4m.1870 meganuclease.

[0809] SEQ ID NO: 290 sets forth the amino acid sequence of the LOX 3-4m.1873 meganuclease.

[0810] SEQ ID NO: 291 sets forth the amino acid sequence of the LOX 3-4m.1875 meganuclease.

[0811] SEQ ID NO: 292 sets forth the nucleic acid of the LOX 3-4 recognition sequence (sense) with a GCAT center sequence.

[0812] SEQ ID NO: 293 sets forth the nucleic acid of the LOX 3-4 recognition sequence (antisense) with a GCAT center sequence.

[0813] SEQ ID NO: 294 sets forth the amino acid sequence of the LOX 3-4m.1600 meganuclease.

[0814] SEQ ID NO: 295 sets forth the amino acid sequence of the LOX 3-4m.1601 meganuclease.

[0815] SEQ ID NO: 296 sets forth the amino acid sequence of the LOX 3-4m.1605 meganuclease.

[0816] SEQ ID NO: 297 sets forth the amino acid sequence of the LOX 3-4m.1606 meganuclease.

[0817] SEQ ID NO: 298 sets forth the amino acid sequence of the LOX 3-4m.1623 meganuclease.

[0818] SEQ ID NO: 299 sets forth the amino acid sequence of the LOX 3-4m.1660 meganuclease.

[0819] SEQ ID NO: 300 sets forth the amino acid sequence of the LOX 3-4m.1661 meganuclease.

[0820] SEQ ID NO: 301 sets forth the amino acid sequence of the LOX 3-4m.1665 meganuclease.

[0821] SEQ ID NO: 302 sets forth the amino acid sequence of the LOX 3-4m.1667 meganuclease.

[0822] SEQ ID NO: 303 sets forth the amino acid sequence of the LOX 3-4m.1669 meganuclease.

[0823] SEQ ID NO: 304 sets forth the amino acid sequence of the LOX 3-4m.1672 meganuclease.

[0824] SEQ ID NO: 305 sets forth the amino acid sequence of the LOX 3-4m.1674 meganuclease.

[0825] SEQ ID NO: 306 sets forth the amino acid sequence of the LOX 3-4m.1676 meganuclease.

[0826] SEQ ID NO: 307 sets forth the amino acid sequence of the LOX 3-4m.1677 meganuclease.

[0827] SEQ ID NO: 308 sets forth the amino acid sequence of the LOX 3-4m.1679 meganuclease.

[0828] SEQ ID NO: 309 sets forth the amino acid sequence of the LOX 3-4m.1684 meganuclease.

[0829] SEQ ID NO: 310 sets forth the amino acid sequence of the LOX 3-4m.1685 meganuclease.

[0830] SEQ ID NO: 311 sets forth the amino acid sequence of the LOX 3-4m.1687 meganuclease.

[0831] SEQ ID NO: 312 sets forth the amino acid sequence of the LOX 3-4m.1689 meganuclease.

[0832] SEQ ID NO: 313 sets forth the amino acid sequence of the LOX 3-4m.1691 meganuclease.

[0833] SEQ ID NO: 314 sets forth the nucleic acid of the LOX 3-4 recognition sequence (sense) with a GCGA center sequence.

[0834] SEQ ID NO: 315 sets forth the nucleic acid of the LOX 3-4 recognition sequence (antisense) with a GCGA center sequence.

[0835] SEQ ID NO: 316 sets forth the amino acid sequence of the LOX 3-4m.1694 meganuclease.

[0836] SEQ ID NO: 317 sets forth the amino acid sequence of the LOX 3-4m.1745 meganuclease.

[0837] SEQ ID NO: 318 sets forth the amino acid sequence of the LOX 3-4m.1752 meganuclease.

[0838] SEQ ID NO: 319 sets forth the amino acid sequence of the LOX 3-4m.1753 meganuclease.

[0839] SEQ ID NO: 320 sets forth the amino acid sequence of the LOX 3-4m.1765 meganuclease.

[0840] SEQ ID NO: 321 sets forth the amino acid sequence of the LOX 3-4m.1770 meganuclease.

[0841] SEQ ID NO: 322 sets forth the amino acid sequence of the LOX 3-4m.1774 meganuclease.

[0842] SEQ ID NO: 323 sets forth the amino acid sequence of the LOX 3-4m.1780 meganuclease.

[0843] SEQ ID NO: 324 sets forth the amino acid sequence of the LOX 3-4m.1781 meganuclease.

[0844] SEQ ID NO: 325 sets forth the amino acid sequence of the LOX 3-4m.1782 meganuclease.

[0845] SEQ ID NO: 326 sets forth the nucleic acid sequence of the GCAG LOX 3-4 recognition sequence (sense).

[0846] SEQ ID NO: 327 sets forth the nucleic acid sequence of the GCAG LOX 3-4 recognition sequence (antisense).

[0847] SEQ ID NO: 328 sets forth the amino acid sequence of the LOX 3-4m.494 meganuclease.

[0848] SEQ ID NO: 329 sets forth the amino acid sequence of the LOX 3-4m.509 meganuclease.

[0849] SEQ ID NO: 330 sets forth the amino acid sequence of the LOX 3-4m.524 meganuclease.

[0850] SEQ ID NO: 331 sets forth the nucleic acid of the LOX 3-4 recognition sequence (sense) with a TCAA center sequence.

[0851] SEQ ID NO: 332 sets forth the nucleic acid of the LOX 3-4 recognition sequence (antisense) with a TCAA center sequence.

[0852] SEQ ID NO: 333 sets forth the amino acid sequence of the LOX 3-4m.2157 meganuclease.

[0853] SEQ ID NO: 334 sets forth the amino acid sequence of the LOX 3-4m.2165 meganuclease.

[0854] SEQ ID NO: 335 sets forth the amino acid sequence of the LOX 3-4m.2189 meganuclease.

[0855] SEQ ID NO: 336 sets forth the amino acid sequence of the LOX 3-4m.2207 meganuclease.

[0856] SEQ ID NO: 337 sets forth the amino acid sequence of the LOX 3-4m.2225 meganuclease.

[0857] SEQ ID NO: 338 sets forth the amino acid sequence of the LOX 3-4m.2229 meganuclease.

[0858] SEQ ID NO: 339 sets forth the amino acid sequence of the LOX 3-4m.2235 meganuclease.

[0859] SEQ ID NO: 340 sets forth the amino acid sequence of the LOX 3-4m.2238 meganuclease.

[0860] SEQ ID NO: 341 sets forth the nucleic acid of the LOX 3-4 recognition sequence (sense) with a TTAA center sequence.

[0861] SEQ ID NO: 342 sets forth the nucleic acid of the LOX 3-4 recognition sequence (antisense) with a TTAA center sequence.

[0862] SEQ ID NO: 343 sets forth the amino acid sequence of the LOX 3-4m.2071 meganuclease.

[0863] SEQ ID NO: 344 sets forth the amino acid sequence of the LOX 3-4m.2077 meganuclease.

[0864] SEQ ID NO: 345 sets forth the amino acid sequence of the LOX 3-4m.2082 meganuclease.

[0865] SEQ ID NO: 346 sets forth the amino acid sequence of the LOX 3-4m.2086 meganuclease.

[0866] SEQ ID NO: 347 sets forth the amino acid sequence of the LOX 3-4m.2087 meganuclease.

[0867] SEQ ID NO: 348 sets forth the amino acid sequence of the LOX 3-4m.2102 meganuclease.

[0868] SEQ ID NO: 349 sets forth the amino acid sequence of the LOX 3-4m.2111 meganuclease.

[0869] SEQ ID NO: 350 sets forth the amino acid sequence of the LOX 3-4m.2116 meganuclease.

[0870] SEQ ID NO: 351 sets forth the amino acid sequence of the LOX 3-4m.2125 meganuclease.

[0871] SEQ ID NO: 352 sets forth the amino acid sequence of the LOX 3-4m.2132 meganuclease.

[0872] SEQ ID NO: 353 sets forth the amino acid sequence of the LOX 3-4m.2138 meganuclease.

[0873] SEQ ID NO: 354 sets forth the amino acid sequence of the LOX 3-4m.2141 meganuclease.

[0874] SEQ ID NO: 355 sets forth the amino acid sequence of the LOX 3-4m.2142 meganuclease.

[0875] SEQ ID NO: 356 sets forth the amino acid sequence of the LOX 3-4m.2145 meganuclease.

[0876] SEQ ID NO: 357 sets forth the amino acid sequence of the LOX 3-4m.2151 meganuclease.

[0877] SEQ ID NO: 358 sets forth the nucleic acid of the LOX 3-4 recognition sequence (sense) with a GTAA center sequence.

[0878] SEQ ID NO: 359 sets forth the nucleic acid of the LOX 3-4 recognition sequence (antisense) with a GTAA center sequence.

[0879] SEQ ID NO: 360 sets forth the amino acid sequence of the LOX 3-4m.1 meganuclease.

[0880] SEQ ID NO: 361 sets forth the amino acid sequence of the LOX 3-4m.2 meganuclease.

[0881] SEQ ID NO: 362 sets forth the amino acid sequence of the LOX 3-4m.3 meganuclease.

[0882] SEQ ID NO: 363 sets forth the amino acid sequence of the LOX 3-4m.4 meganuclease.

[0883] SEQ ID NO: 364 sets forth the amino acid sequence of the LOX 3-4m.5 meganuclease.

[0884] SEQ ID NO: 365 sets forth the amino acid sequence of the LOX 3-4m.6 meganuclease.

[0885] SEQ ID NO: 366 sets forth the amino acid sequence of the LOX 3-4m.7 meganuclease.

[0886] SEQ ID NO: 367 sets forth the amino acid sequence of the LOX 3-4m.8 meganuclease.

[0887] SEQ ID NO: 368 sets forth the amino acid sequence of the LOX 3-4m.9 meganuclease.

[0888] SEQ ID NO: 369 sets forth the amino acid sequence of the LOX 3-4m.10 meganuclease.

[0889] SEQ ID NO: 370 sets forth the amino acid sequence of the LOX 3-4m.11 meganuclease.

[0890] SEQ ID NO: 371 sets forth the amino acid sequence of the LOX 3-4m.12 meganuclease.

[0891] SEQ ID NO: 372 sets forth the amino acid sequence of the LOX 3-4m.13 meganuclease.

[0892] SEQ ID NO: 373 sets forth the amino acid sequence of the LOX 3-4m.14 meganuclease.

[0893] SEQ ID NO: 374 sets forth the amino acid sequence of the LOX 3-4m.15 meganuclease.

[0894] SEQ ID NO: 375 sets forth the amino acid sequence of the LOX 3-4m.16 meganuclease.

[0895] SEQ ID NO: 376 sets forth the amino acid sequence of the LOX 3-4m.17 meganuclease.

[0896] SEQ ID NO: 377 sets forth the amino acid sequence of the LOX 3-4m.18 meganuclease.

[0897] SEQ ID NO: 378 sets forth the amino acid sequence of the LOX 3-4m.19 meganuclease.

[0898] SEQ ID NO: 379 sets forth the amino acid sequence of the LOX 3-4m.20 meganuclease.

[0899] SEQ ID NO: 380 sets forth the amino acid sequence of the LOX 3-4m.21 meganuclease.

[0900] SEQ ID NO: 381 sets forth the amino acid sequence of the LOX 3-4m.22 meganuclease.

[0901] SEQ ID NO: 382 sets forth the amino acid sequence of the LOX 3-4m.23 meganuclease.

[0902] SEQ ID NO: 383 sets forth the amino acid sequence of the LOX 3-4m.24 meganuclease.

[0903] SEQ ID NO: 384 sets forth the amino acid sequence of the LOX 3-4m.25 meganuclease.

[0904] SEQ ID NO: 385 sets forth the amino acid sequence of the LOX 3-4m.26 meganuclease.

[0905] SEQ ID NO: 386 sets forth the amino acid sequence of the LOX 3-4m.27 meganuclease.

[0906] SEQ ID NO: 387 sets forth the amino acid sequence of the LOX 3-4m.28 meganuclease.

[0907] SEQ ID NO: 388 sets forth the amino acid sequence of the LOX 3-4m.29 meganuclease.

[0908] SEQ ID NO: 389 sets forth the amino acid sequence of the LOX 3-4m.30 meganuclease.

[0909] SEQ ID NO: 390 sets forth the nucleic acid of the LOX 3-4 recognition sequence (sense) with a GTAG center sequence.

[0910] SEQ ID NO: 391 sets forth the nucleic acid of the LOX 3-4 recognition sequence (antisense) with a GTAG center sequence.

[0911] SEQ ID NO: 392 sets forth the amino acid sequence of the LOX 3-4m.95 meganuclease.

[0912] SEQ ID NO: 393 sets forth the amino acid sequence of the LOX 3-4m.96 meganuclease.

[0913] SEQ ID NO: 394 sets forth the amino acid sequence of the LOX 3-4m.97 meganuclease.

[0914] SEQ ID NO: 395 sets forth the amino acid sequence of the LOX 3-4m.102 meganuclease.

[0915] SEQ ID NO: 396 sets forth the amino acid sequence of the LOX 3-4m.108 meganuclease.

[0916] SEQ ID NO: 397 sets forth the amino acid sequence of the LOX 3-4m.111 meganuclease.

[0917] SEQ ID NO: 398 sets forth the amino acid sequence of the LOX 3-4m.114 meganuclease.

[0918] SEQ ID NO: 399 sets forth the amino acid sequence of the LOX 3-4m.123 meganuclease.

[0919] SEQ ID NO: 400 sets forth the nucleic acid of the LOX 3-4 recognition sequence (sense) with a GTAT center sequence.

[0920] SEQ ID NO: 401 sets forth the nucleic acid of the LOX 3-4 recognition sequence (antisense) with a GTAT center sequence.

[0921] SEQ ID NO: 402 sets forth the amino acid sequence of the LOX 3-4m.124 meganuclease.

[0922] SEQ ID NO: 403 sets forth the amino acid sequence of the LOX 3-4m.125 meganuclease.

[0923] SEQ ID NO: 404 sets forth the amino acid sequence of the LOX 3-4m.126 meganuclease.

[0924] SEQ ID NO: 405 sets forth the amino acid sequence of the LOX 3-4m.127 meganuclease.

[0925] SEQ ID NO: 406 sets forth the amino acid sequence of the LOX 3-4m.128 meganuclease.

[0926] SEQ ID NO: 407 sets forth the amino acid sequence of the LOX 3-4m.129 meganuclease.

[0927] SEQ ID NO: 408 sets forth the amino acid sequence of the LOX 3-4m.130 meganuclease.

[0928] SEQ ID NO: 409 sets forth the amino acid sequence of the LOX 3-4m.131 meganuclease.

[0929] SEQ ID NO: 410 sets forth the amino acid sequence of the LOX 3-4m.132 meganuclease.

[0930] SEQ ID NO: 411 sets forth the amino acid sequence of the LOX 3-4m.133 meganuclease.

[0931] SEQ ID NO: 412 sets forth the amino acid sequence of the LOX 3-4m.134 meganuclease.

[0932] SEQ ID NO: 413 sets forth the amino acid sequence of the LOX 3-4m.135 meganuclease.

[0933] SEQ ID NO: 414 sets forth the amino acid sequence of the LOX 3-4m.136 meganuclease.

[0934] SEQ ID NO: 415 sets forth the amino acid sequence of the LOX 3-4m.137 meganuclease.

[0935] SEQ ID NO: 416 sets forth the amino acid sequence of the LOX 3-4m.138 meganuclease.

[0936] SEQ ID NO: 417 sets forth the amino acid sequence of the LOX 3-4m.139 meganuclease.

[0937] SEQ ID NO: 418 sets forth the amino acid sequence of the LOX 3-4m.140 meganuclease.

[0938] SEQ ID NO: 419 sets forth the amino acid sequence of the LOX 3-4m.141 meganuclease.

[0939] SEQ ID NO: 420 sets forth the amino acid sequence of the LOX 3-4m.142 meganuclease.

[0940] SEQ ID NO: 421 sets forth the amino acid sequence of the LOX 3-4m.143 meganuclease.

[0941] SEQ ID NO: 422 sets forth the amino acid sequence of the LOX 3-4m.144 meganuclease.

[0942] SEQ ID NO: 423 sets forth the amino acid sequence of the LOX 3-4m.145 meganuclease.

[0943] SEQ ID NO: 424 sets forth the amino acid sequence of the LOX 3-4m.146 meganuclease.

[0944] SEQ ID NO: 425 sets forth the amino acid sequence of the LOX 3-4m.147 meganuclease.

[0945] SEQ ID NO: 426 sets forth the amino acid sequence of the LOX 3-4m.148 meganuclease.

[0946] SEQ ID NO: 427 sets forth the amino acid sequence of the LOX 3-4m.149 meganuclease.

[0947] SEQ ID NO: 428 sets forth the amino acid sequence of the LOX 3-4m.150 meganuclease.

[0948] SEQ ID NO: 429 sets forth the amino acid sequence of the LOX 3-4m.151 meganuclease.

[0949] SEQ ID NO: 430 sets forth the amino acid sequence of the LOX 3-4m.152 meganuclease.

[0950] SEQ ID NO: 431 sets forth the amino acid sequence of the LOX 3-4m.153 meganuclease.

[0951] SEQ ID NO: 432 sets forth the amino acid sequence of the LOX 3-4m.154 meganuclease.

[0952] SEQ ID NO: 433 sets forth the amino acid sequence of the LOX 3-4m.155 meganuclease.

[0953] SEQ ID NO: 434 sets forth the nucleic acid of the LOX 3-4 recognition sequence (sense) with a GTGA center sequence.

[0954] SEQ ID NO: 435 sets forth the nucleic acid of the LOX 3-4 recognition sequence (antisense) with a GTGA center sequence.

[0955] SEQ ID NO: 436 sets forth the amino acid sequence of the LOX 3-4m.31 meganuclease.

[0956] SEQ ID NO: 437 sets forth the amino acid sequence of the LOX 3-4m.32 meganuclease.

[0957] SEQ ID NO: 438 sets forth the amino acid sequence of the LOX 3-4m.33 meganuclease.

[0958] SEQ ID NO: 439 sets forth the amino acid sequence of the LOX 3-4m.35 meganuclease.

[0959] SEQ ID NO: 440 sets forth the amino acid sequence of the LOX 3-4m.36 meganuclease.

[0960] SEQ ID NO: 441 sets forth the amino acid sequence of the LOX 3-4m.37 meganuclease.

[0961] SEQ ID NO: 442 sets forth the amino acid sequence of the LOX 3-4m.38 meganuclease.

[0962] SEQ ID NO: 443 sets forth the amino acid sequence of the LOX 3-4m.39 meganuclease.

[0963] SEQ ID NO: 444 sets forth the amino acid sequence of the LOX 3-4m.40 meganuclease.

[0964] SEQ ID NO: 445 sets forth the amino acid sequence of the LOX 3-4m.41 meganuclease.

[0965] SEQ ID NO: 446 sets forth the amino acid sequence of the LOX 3-4m.42 meganuclease.

[0966] SEQ ID NO: 447 sets forth the amino acid sequence of the LOX 3-4m.43 meganuclease.

[0967] SEQ ID NO: 448 sets forth the amino acid sequence of the LOX 3-4m.44 meganuclease.

[0968] SEQ ID NO: 449 sets forth the amino acid sequence of the LOX 3-4m.46 meganuclease.

[0969] SEQ ID NO: 450 sets forth the amino acid sequence of the LOX 3-4m.47 meganuclease.

[0970] SEQ ID NO: 451 sets forth the amino acid sequence of the LOX 3-4m.48 meganuclease.

[0971] SEQ ID NO: 452 sets forth the amino acid sequence of the LOX 3-4m.49 meganuclease.

[0972] SEQ ID NO: 453 sets forth the amino acid sequence of the LOX 3-4m.50 meganuclease.

[0973] SEQ ID NO: 454 sets forth the amino acid sequence of the LOX 3-4m.51 meganuclease.

[0974] SEQ ID NO: 455 sets forth the amino acid sequence of the LOX 3-4m.52 meganuclease.

[0975] SEQ ID NO: 456 sets forth the amino acid sequence of the LOX 3-4m.53 meganuclease.

[0976] SEQ ID NO: 457 sets forth the amino acid sequence of the LOX 3-4m.54 meganuclease.

[0977] SEQ ID NO: 458 sets forth the amino acid sequence of the LOX 3-4m.56 meganuclease.

[0978] SEQ ID NO: 459 sets forth the amino acid sequence of the LOX 3-4m.57 meganuclease.

[0979] SEQ ID NO: 460 sets forth the amino acid sequence of the LOX 3-4m.58 meganuclease.

[0980] SEQ ID NO: 461 sets forth the amino acid sequence of the LOX 3-4m.59 meganuclease.

[0981] SEQ ID NO: 462 sets forth the amino acid sequence of the LOX 3-4m.61 meganuclease.

[0982] SEQ ID NO: 463 sets forth the nucleic acid of the LOX 3-4 recognition sequence (sense) with a GTGC center sequence.

[0983] SEQ ID NO: 464 sets forth the nucleic acid of the LOX 3-4 recognition sequence (antisense) with a GTGC center sequence.

[0984] SEQ ID NO: 465 sets forth the amino acid sequence of the LOX 3-4m.156 meganuclease.

[0985] SEQ ID NO: 466 sets forth the amino acid sequence of the LOX 3-4m.157 meganuclease.

[0986] SEQ ID NO: 467 sets forth the amino acid sequence of the LOX 3-4m.158 meganuclease.

[0987] SEQ ID NO: 468 sets forth the amino acid sequence of the LOX 3-4m.159 meganuclease.

[0988] SEQ ID NO: 469 sets forth the amino acid sequence of the LOX 3-4m.160 meganuclease.

[0989] SEQ ID NO: 470 sets forth the amino acid sequence of the LOX 3-4m.161 meganuclease.

[0990] SEQ ID NO: 471 sets forth the amino acid sequence of the LOX 3-4m.162 meganuclease.

[0991] SEQ ID NO: 472 sets forth the amino acid sequence of the LOX 3-4m.163 meganuclease.

[0992] SEQ ID NO: 473 sets forth the amino acid sequence of the LOX 3-4m.164 meganuclease.

[0993] SEQ ID NO: 474 sets forth the amino acid sequence of the LOX 3-4m.165 meganuclease.

[0994] SEQ ID NO: 475 sets forth the amino acid sequence of the LOX 3-4m.166 meganuclease.

[0995] SEQ ID NO: 476 sets forth the amino acid sequence of the LOX 3-4m.167 meganuclease.

[0996] SEQ ID NO: 477 sets forth the amino acid sequence of the LOX 3-4m.168 meganuclease.

[0997] SEQ ID NO: 478 sets forth the amino acid sequence of the LOX 3-4m.169 meganuclease.

[0998] SEQ ID NO: 479 sets forth the amino acid sequence of the LOX 3-4m.170 meganuclease.

[0999] SEQ ID NO: 480 sets forth the amino acid sequence of the LOX 3-4m.171 meganuclease.

[1000] SEQ ID NO: 481 sets forth the amino acid sequence of the LOX 3-4m.172 meganuclease.

[1001] SEQ ID NO: 482 sets forth the amino acid sequence of the LOX 3-4m.173 meganuclease.

[1002] SEQ ID NO: 483 sets forth the amino acid sequence of the LOX 3-4m.174 meganuclease.

[1003] SEQ ID NO: 484 sets forth the amino acid sequence of the LOX 3-4m.175 meganuclease.

[1004] SEQ ID NO: 485 sets forth the amino acid sequence of the LOX 3-4m.176 meganuclease.

[1005] SEQ ID NO: 486 sets forth the amino acid sequence of the LOX 3-4m.177 meganuclease.

[1006] SEQ ID NO: 487 sets forth the amino acid sequence of the LOX 3-4m.178 meganuclease.

[1007] SEQ ID NO: 488 sets forth the amino acid sequence of the LOX 3-4m.179 meganuclease.

[1008] SEQ ID NO: 489 sets forth the amino acid sequence of the LOX 3-4m.180 meganuclease.

[1009] SEQ ID NO: 490 sets forth the amino acid sequence of the LOX 3-4m.181 meganuclease.

[1010] SEQ ID NO: 491 sets forth the amino acid sequence of the LOX 3-4m.182 meganuclease.

[1011] SEQ ID NO: 492 sets forth the amino acid sequence of the LOX 3-4m.183 meganuclease.

[1012] SEQ ID NO: 493 sets forth the amino acid sequence of the LOX 3-4m.184 meganuclease.

[1013] SEQ ID NO: 494 sets forth the amino acid sequence of the LOX 3-4m.185 meganuclease.

[1014] SEQ ID NO: 495 sets forth the amino acid sequence of the LOX 3-4m.186 meganuclease.

[1015] SEQ ID NO: 496 sets forth the nucleic acid of the LOX 3-4 recognition sequence (sense) with a GTGG center sequence.

[1016] SEQ ID NO: 497 sets forth the nucleic acid of the LOX 3-4 recognition sequence (antisense) with a GTGG center sequence.

[1017] SEQ ID NO: 498 sets forth the amino acid sequence of the LOX 3-4m.187 meganuclease.

[1018] SEQ ID NO: 499 sets forth the amino acid sequence of the LOX 3-4m.192 meganuclease.

[1019] SEQ ID NO: 500 sets forth the amino acid sequence of the LOX 3-4m.201 meganuclease.

[1020] SEQ ID NO: 501 sets forth the amino acid sequence of the LOX 3-4m.203 meganuclease.

[1021] SEQ ID NO: 502 sets forth the nucleic acid of the LOX 3-4 recognition sequence (sense) with a GTGT center sequence.

[1022] SEQ ID NO: 503 sets forth the nucleic acid of the LOX 3-4 recognition sequence (antisense) with a GTGT center sequence.

[1023] SEQ ID NO: 504 sets forth the amino acid sequence of the LOX 3-4m.63 meganuclease.

[1024] SEQ ID NO: 505 sets forth the amino acid sequence of the LOX 3-4m.64 meganuclease.

[1025] SEQ ID NO: 506 sets forth the amino acid sequence of the LOX 3-4m.65 meganuclease.

[1026] SEQ ID NO: 507 sets forth the amino acid sequence of the LOX 3-4m.66 meganuclease.

[1027] SEQ ID NO: 508 sets forth the amino acid sequence of the LOX 3-4m.67 meganuclease.

[1028] SEQ ID NO: 509 sets forth the amino acid sequence of the LOX 3-4m.68 meganuclease.

[1029] SEQ ID NO: 510 sets forth the amino acid sequence of the LOX 3-4m.69 meganuclease.

[1030] SEQ ID NO: 511 sets forth the amino acid sequence of the LOX 3-4m.70 meganuclease.

[1031] SEQ ID NO: 512 sets forth the amino acid of the meganuclease with a LOX 3-4m.71 center sequence.

[1032] SEQ ID NO: 513 sets forth the amino acid of the meganuclease with a LOX 3-4m.73 center sequence.

[1033] SEQ ID NO: 514 sets forth the amino acid sequence of the LOX 3-4m.74 meganuclease.

[1034] SEQ ID NO: 515 sets forth the amino acid sequence of the LOX 3-4m.75 meganuclease.

[1035] SEQ ID NO: 516 sets forth the amino acid sequence of the LOX 3-4m.77 meganuclease.

[1036] SEQ ID NO: 517 sets forth the amino acid sequence of the LOX 3-4m.78 meganuclease.

[1037] SEQ ID NO: 518 sets forth the amino acid sequence of the LOX 3-4m.80 meganuclease.

[1038] SEQ ID NO: 519 sets forth the amino acid sequence of the LOX 3-4m.83 meganuclease.

[1039] SEQ ID NO: 520 sets forth the amino acid sequence of the LOX 3-4m.84 meganuclease.

[1040] SEQ ID NO: 521 sets forth the amino acid sequence of the LOX 3-4m.85 meganuclease.

[1041] SEQ ID NO: 522 sets forth the amino acid sequence of the LOX 3-4m.86 meganuclease.

[1042] SEQ ID NO: 523 sets forth the amino acid sequence of the LOX 3-4m.87 meganuclease.

[1043] SEQ ID NO: 524 sets forth the amino acid sequence of the LOX 3-4m.88 meganuclease.

[1044] SEQ ID NO: 525 sets forth the amino acid sequence of the LOX 3-4m.89 meganuclease.

[1045] SEQ ID NO: 526 sets forth the amino acid sequence of the LOX 3-4m.90 meganuclease.

[1046] SEQ ID NO: 527 sets forth the amino acid sequence of the LOX 3-4m.91 meganuclease.

[1047] SEQ ID NO: 528 sets forth the amino acid sequence of the LOX 3-4m.92 meganuclease.

[1048] SEQ ID NO: 529 sets forth the amino acid sequence of the LOX 3-4m.93 meganuclease.

[1049] SEQ ID NO: 530 sets forth the amino acid sequence of a polypeptide linker.

### DETAILED DESCRIPTION OF THE INVENTION

### 1.1 References and Definitions

[1050] The patent and scientific literature referred to herein establishes knowledge that is available to those of skill in the art. The issued US patents, allowed applications, published foreign applications, and references, including GenBank database sequences, which are cited herein are hereby incorporated by reference to the same extent as if each was specifically and individually indicated to be incorporated by reference.

[1051] The present invention can be embodied in different forms and should not be construed as limited to the embodiments set forth herein. Rather, these embodiments are provided so that this disclosure will be thorough and complete, and will fully convey the scope of the invention to those skilled in the art. For example, features illustrated with respect to one embodiment can be incorporated into other embodiments, and features illustrated with respect to a particular embodiment can be deleted from that embodiment. In addition, numerous variations and additions to the embodiments suggested herein will be apparent to those skilled in the art in light of the instant disclosure, which do not depart from the instant invention.

[1052] Unless otherwise defined, all technical and scientific terms used herein have the same meaning as commonly understood by one of ordinary skill in the art to which this invention belongs. The terminology used in the description of the invention herein is for the purpose of describing particular embodiments only and is not intended to be limiting of the invention.

[1053] All publications, patent applications, patents, and other references mentioned herein are incorporated by reference herein in their entirety.

[1054] As used herein, “a,” “an,” or “the” can mean one or more than one. For example, “a” cell can mean a single cell or a multiplicity of cells.

[1055] As used herein, unless specifically indicated otherwise, the word “or” is used in the inclusive sense of “and/or” and not the exclusive sense of “either/or.”

[1056] As used herein, the terms “nuclease” and “endonuclease” are used interchangeably to refer to naturally-occurring or engineered enzymes, which cleave a phosphodiester bond within a polynucleotide chain.

[1057] As used herein, the terms “cleave” or “cleavage” refer to the hydrolysis of phosphodiester bonds within the backbone of a recognition sequence within a target sequence that results in a double-stranded break within the target sequence, referred to herein as a “cleavage site”. In some embodiments described herein, modification or substitution at one or more positions corresponding to positions 48, 50, 71, 72, 73, 73B and 74 of I-CreI (i.e., SEQ ID NO: 1) increase the cleavage activity of a engineered meganuclease.

[1058] As used herein, the term “meganuclease” refers to an endonuclease that binds double-stranded DNA at a recognition sequence that is greater than 12 base pairs. In some embodiments, the recognition sequence for a meganuclease of the present disclosure is 22 base pairs. A meganuclease can be an endonuclease that is derived from I-CreI (SEQ ID NO: 1), and can refer to an engineered variant of I-CreI that has been modified relative to natural I-CreI with respect to, for example, DNA-binding specificity, DNA cleavage activity, DNA-binding affinity, or dimerization properties. Methods for producing such modified variants of I-CreI are known in the art (e.g., WO 2007/047859, incorporated by reference in its entirety). A meganuclease as used herein binds to double-stranded DNA as a heterodimer. A meganuclease may also be a “single-chain meganuclease” in which a pair of DNA-binding domains is joined into a single polypeptide using a peptide linker. The term “homing endonuclease” is synonymous with the term “meganuclease.” Meganucleases of the present disclosure are substantially non-toxic when expressed in the targeted cells as described herein such that cells can be transfected and maintained at 37° C. without observing deleterious effects on cell viability or significant reductions in meganuclease cleavage activity when measured using the methods described herein.

[1059] As used herein, the term “single-chain meganuclease” refers to a polypeptide comprising a pair of nuclease subunits joined by a linker. A single-chain meganuclease has the organization: N-terminal subunit—Linker—C-terminal subunit. The two meganuclease subunits will generally be non-identical in amino acid sequence and will bind non-identical DNA sequences. Thus, single-chain meganucleases typically cleave pseudo-palindromic or non-palindromic recognition sequences. Engineered I-CreI-derived meganucleases that are single-chain meganucleases, and methods for producing them, are disclosed in WO 2009/059195, which is incorporated by reference herein. A single-chain meganuclease may be referred to as a “single-chain heterodimer” or “single-chain heterodimeric meganuclease” although it is not, in fact, dimeric. For clarity, unless otherwise specified, the term “meganuclease” can refer to a dimeric or single-chain meganuclease.

[1060] As used herein, the term “linker” refers to an exogenous peptide sequence used to join two nuclease subunits into a single polypeptide. A linker may have a sequence that is found in natural proteins or may be an artificial sequence that is not found in any natural protein. A linker may be flexible and lacking in secondary structure or may have a propensity to form a specific three-dimensional structure under physiological conditions. A linker can include, without limitation, those encompassed by U.S. Pat. Nos. 8,445,251, 9,340,777, 9,434,931, and 10,041,053, each of which is incorporated by reference in its entirety. In some embodiments, a linker may have at least 80%, at least 85%, at least 90%, at least 91%, at least 92%, at least 93%, at least 94%, at least 95%, at least 96%, at least 97%, at least 98%, at least 99%, or more, sequence identity to SEQ ID NO: 530, which sets forth residues 154-195 of SEQ ID NOs: 11-33, 36-43, 46-67, 70-89, 92-118, 121-135, 138-156, 159-183, 186-199, 202-219, 222-243, 246-247, 250-266, 269-291, 294-313, 316-325, 328-330, 333-340, 343-357, 360-389, 392-399, 402-433, 436-462, 465-495, 498-501, and 504-529.

[1061] As used herein, the term “hypervariable region” refers to a localized sequence within a meganuclease monomer or subunit that comprises amino acids with relatively high variability. A hypervariable region can comprise about 50-60 contiguous residues, about 53-57 contiguous residues, or preferably about 56 residues. In some embodiments, the residues of a hypervariable region may correspond to positions 24-79 or positions 215-270 of any one of SEQ ID NOs: 11-33, 36-43, 46-67, 70-89, 92-118, 121-135, 138-156, 159-183, 186-199, 202-219, 222-243, 246-247, 250-266, 269-291, 294-313, 316-325, 328-330, 333-340, 343-357, 360-389, 392-399, 402-433, 436-462, 465-495, 498-501, and 504-529. Although positions 48, 50, 71, 72, 73, and 74 are located within the hypervariable region, it is thought that these positions affect cleavage of a center sequence and not necessarily the binding of the meganuclease to a specific recognition sequence site. Thus, when designing two meganucleases targeting two different recognitions sequences having the same center sequence, it may not be required to modify positions 48, 50, 71, 72, 73, and 74 between the two meganucleases. A hypervariable region can comprise one or more residues that contact DNA bases in a recognition sequence and can be modified to alter base preference of the monomer or subunit. A hypervariable region can also comprise one or more residues that bind to the DNA backbone when the meganuclease associates with a double-stranded DNA recognition sequence. Such residues can be modified to alter the binding affinity of the meganuclease for the DNA backbone and the target recognition sequence. In different embodiments of the invention, a hypervariable region may comprise between 1-20 residues that exhibit variability and can be modified to influence base preference and/or DNA-binding affinity. In particular embodiments, a hypervariable region comprises between about 15-20 residues that exhibit variability and can be modified to influence base preference and/or DNA-binding affinity. In some embodiments, variable residues within a hypervariable region correspond to one or more of positions 24, 26, 28, 30, 32, 33, 38, 40, 42, 44, 46, 68, 70, 75, and 77 of any one of SEQ ID NOs: 11-33, 36-43, 46-67, 70-89, 92-118, 121-135, 138-156, 159-183, 186-199, 202-219, 222-243, 246-247, 250-266, 269-291, 294-313, 316-325, 328-330, 333-340, 343-357, 360-389, 392-399, 402-433, 436-462, 465-495, 498-501, and 504-529. In other embodiments, variable residues within a hypervariable region correspond to one or more of positions 215, 217, 219, 221, 223, 224, 229, 231, 233, 235, 237, 259, 261, 266, and 268 of any one of SEQ ID NOs: 11-33, 36-43, 46-67, 70-89, 92-118, 121-135, 138-156, 159-183, 186-199, 202-219, 222-243, 246-247, 250-266, 269-291, 294-313, 316-325, 328-330, 333-340, 343-357, 360-389, 392-399, 402-433, 436-462, 465-495, 498-501, and 504-529.

[1062] As used herein, the terms “recombinant” or “engineered,” with respect to a protein, means having an altered amino acid sequence as a result of the application of genetic engineering techniques to nucleic acids that encode the protein and cells or organisms that express the protein. With respect to a nucleic acid, the term “recombinant” or “engineered” means having an altered nucleic acid sequence as a result of the application of genetic engineering techniques. Genetic engineering techniques include, but are not limited to, PCR and DNA cloning technologies; transfection, transformation, and other gene transfer technologies; homologous recombination; site-directed mutagenesis; and gene fusion. In accordance with this definition, a protein having an amino acid sequence identical to a naturally-occurring protein, but produced by cloning and expression in a heterologous host, is not considered recombinant or engineered.

[1063] As used herein, the term “wild-type” refers to the most common naturally occurring allele (i.e., polynucleotide sequence) in the allele population of the same type of gene, wherein a polypeptide encoded by the wild-type allele has its original functions. The term “wild-type” also refers to a polypeptide encoded by a wild-type allele. Wild-type alleles (i.e., polynucleotides) and polypeptides are distinguishable from mutant or variant alleles and polypeptides, which comprise one or more mutations and/or substitutions relative to the wild-type sequence(s). Whereas a wild-type allele or polypeptide can confer a normal phenotype in an organism, a mutant or variant allele or polypeptide can, in some instances, confer an altered phenotype. Wild-type nucleases are distinguishable from recombinant or non-naturally-occurring nucleases. The term “wild-type” can also refer to a cell, an organism, and/or a subject which possesses a wild-type allele of a particular gene, or a cell, an organism, and/or a subject used for comparative purposes.

[1064] As used herein, the term “genetically-modified” refers to a cell or organism in which, or in an ancestor of which, a genomic DNA sequence has been deliberately modified by recombinant technology. As used herein, the term “genetically-modified” encompasses the term “transgenic.”

[1065] As used herein, the term with respect to recombinant proteins, the term “modification” means any insertion, deletion, or substitution of an amino acid residue in the recombinant sequence relative to a reference sequence (e.g., a wild-type or a native sequence).

[1066] As used herein, the term “recognition sequence” refers to a DNA sequence that is bound and cleaved by wild-type I-CreI or an engineered I-CreI-derived meganuclease of the disclosure. The disclosed recognition sequences cleaved by I-CreI and the disclosed engineered meganucleases are typically 22 nucleotides in length. These recognition sequences comprise a pair of inverted, 9 base pair “half-sites” (each numbered from −1 to −9) which are separated by a four base pair center sequence (numbered +1, +2, +3, and +4) (FIG. 1). In the case of a single-chain meganuclease, the N-terminal domain of the protein recognizes, interacts with and/or contacts one half-site and the C-terminal domain of the protein recognizes, interacts with and/or contacts the other half-site. Cleavage by a meganuclease produces four base pair 3′ “overhangs”. “Overhangs,” or “sticky ends” are short, single-stranded DNA segments that can be produced by endonuclease cleavage of a double-stranded DNA sequence. In the case of meganucleases and single-chain meganucleases derived from I-CreI, the overhang comprises bases 10-13 of the 22 base pair recognition sequence. Thus, an I-CreI meganuclease recognition sequence may be defined according to formula I:

[1067] X₋₉X₋₈X₋₇X₋₆X₋₅X₋₄X₋₃X₋₂X₋₁N₊₁N₊₂N₊₃N₊₄X₋₁X₋₂X₋₃X₋₄X₋₅X₋₆X₋₇X₋₈X₋₉, wherein X and N are each independently nucleotides selected from an adenine nucleotide, a cytosine nucleotide, a guanine nucleotide, and a thymine nucleotide; wherein N₊₁N₊₂N₊₃N₊₄ is the four base pair center sequence.

[1068] As used herein, the term “center sequence” refers to the four base pairs separating half-sites in the meganuclease recognition sequence. These bases are numbered +1 through +4 (FIG. 1 and Formula 1). The center sequence comprises the four bases that become the 3′ single-strand overhangs following meganuclease cleavage. “Center sequence” can refer to the sequence of the sense strand or the antisense (opposite) strand. Meganucleases are symmetric and recognize bases equally on both the sense and antisense strand of the center sequence. For example, the sequence A₊₁A₊₂A₊₃A₊₄ on the sense strand is recognized by, interacted with and/or contacted by a meganuclease as T₊₁T₊₂ T₊₃ T₊₄ on the antisense strand and, thus, A₊₁A₊₂A₊₃A₊₄ and T₊₁T₊₂ T₊₃ T₊₄ are functionally equivalent (e.g., both can be cleaved by a given meganuclease). Thus, the sequence C₊₁T₊₂ G₊₃ C₊₄, is equivalent to its opposite strand sequence, G₊₁ C₊₂A₊₃ G₊₄ due to the fact that the meganuclease binds its recognition sequence as a symmetric homodimer. In most cases, a first subunit of the meganuclease recognizes, interacts with and/or contacts the first two base pairs of the sense strand of a given center sequence and the second two base pairs on the antisense. For example, taking A₊₁A₊₂A₊₃A₊₄ as the center sequence, a first subunit would recognize, interact with and/or contact the two base pairs A₊₁A₊₂, and a second subunit would recognize, interact with and/or contact the anti-sense strand two base pairs A₊₃A₊₄ on the anti-sense strand, which is T₊₄T₊₃.

[1069] As used herein, the term “recognition half-site,” “recognition sequence half-site,” or simply “half-site” means a nucleic acid sequence in a double-stranded DNA molecule which is a monomer a homodimeric or heterodimeric meganuclease binds to (e.g., recognizes), or by one subunit of a single-chain meganuclease.

[1070] As used herein, the term “center sequence half-site,” or simply “center half-site” refers to either the 5′ two base pairs or the 3′ two base pairs of a four base pair center sequence of a recognition sequence as described herein. For example, for the center sequence ACAG, the 5′ two base pairs (i.e., the 5′ center half site) of the center sequence is “AC” and the 3′ two base pairs (i.e., the 3′ center half site) is “AG” (reverse complement being “CT”).

[1071] As used herein, the terms a meganuclease “derived from I-CreI” or an “I-CreI-derived meganuclease” refers to a recombinant variant of a naturally-occurring I-CreI homing endonuclease (SEQ ID NO: 1) that has been modified by one or more amino acid insertions, deletions, and/or substitutions that affect one or more of DNA-binding specificity, DNA cleavage activity, and/or DNA-binding affinity and/or dimerization properties. Some genetically-engineered meganucleases are known in the art (see, e.g., Porteus et al. (2005), Nat. Biotechnol. 23: 967-73; Sussman et al. (2004), J. Mol. Biol. 342: 31-41; Epinat et al. (2003), Nucleic Acids Res. 31: 2952-62) and general methods for rationally-designing such variants have been disclosed, for example, in WO 2007/047859. I-CreI derived meganucleases encompass engineered proteins wherein I-CreI was directly modified, engineered proteins wherein an I-CreI derived meganuclease was further modified, and/or proteins that have been synthetically produced based on an I-CreI derived sequence. As used herein, the term “variants” is intended to mean substantially similar sequences. A “variant” polypeptide is intended to mean a polypeptide derived from the “native” polypeptide by deletion or addition of one or more amino acids at one or more internal sites in the native protein and/or substitution of one or more amino acids at one or more sites in the native polypeptide. As used herein, a “native” polynucleotide or polypeptide comprises a parental sequence from which variants are derived. In some embodiments, an “I-CreI-derived meganuclease” specifically includes any engineered meganuclease within the scope of the published claims of any of International Publication Nos. WO2007/047859, WO2009059195, WO2010/009147, WO2012/167192, WO2015/138739, WO2016/179112, WO2017/044649, WO2017/062439, WO2017/062451, WO2017/112859, WO2017/192741, WO2018/071849, WO2018/195449, WO2019/005957, WO2019/089913, WO2019/200122, and WO2019/200247, and International Publication Nos. PCT/US2019/068186 and PCT/US2020/013198, each of which is incorporated by reference in its entirety herein. In some embodiments, an “I-CreI-derived meganuclease” specifically includes any engineered meganuclease within the scope of the issued claims of any of U.S. Pat. Nos. 8,021,867, 8,119,361, 8,119,381, 8,124,369, 8,129,134, 8,133,697, 8,143,015, 8,143,016, 8,148,098, 8,163,514, 8,304,222, 8,377,674, 8,445,251, 9,340,777, 9,434,931, 10,041,053, 9,683,257, 10,287,626, 10,273,524, 9,683,257, 10,287,626, 10,273,524, 9,822,381, 10,603,363, 9,889,160, 9,889,161, 9,993,501, 9,993,502, 9,950,010, 9,950,011, 9,969,975, 10,093,899, and 10,093,900, each of which is incorporated by reference herein. In some embodiments, an engineered I-CreI-derived meganuclease comprises a polypeptide having at least 85% sequence identity to residues 2-153 of the I-CreI meganuclease of SEQ ID NO: 1, as in the issued claims of each of U.S. Pat. Nos. 8,021,867, 8,119,361, 8,119,381, 8,124,369, 8,129,134, 8,133,697, 8,143,015, 8,143,016, 8,148,098, 8,163,514, 8,304,222, 8,377,674. In some embodiments, an engineered I-CreI-derived meganuclease comprises a polypeptide having at least 86%, 87%, 88%, 89%, 90%, 91%, 92%, 93%, 94%, 95%, 96%, 97%, 98% or 99% sequence identity to residues 2-153 of the I-CreI meganuclease of SEQ ID NO: 1.

[1072] As used herein, the terms “DNA-binding affinity” or “binding affinity” means the tendency of a nuclease to non-covalently associate with a reference DNA molecule (e.g., a recognition sequence or an arbitrary sequence). Binding affinity is measured by a dissociation constant, Kd. As used herein, a nuclease has “altered” binding affinity if the Kd of the nuclease for a reference recognition sequence is increased or decreased by a statistically significant percent change relative to a reference nuclease.

[1073] As used herein, the term “specificity” means the ability of a nuclease to bind (e.g., recognize) and cleave double-stranded DNA molecules only at a particular sequence of base pairs referred to as the recognition sequence, or only at a particular set of recognition sequences. The set of recognition sequences will share certain conserved positions or sequence motifs but may be degenerate at one or more positions. A highly-specific nuclease is capable of cleaving only one or a very few recognition sequences. Specificity can be determined by any method known in the art.

[1074] As used herein, the term “activity” refers to the rate at which a meganuclease of the invention cleaves a particular recognition sequence. Such activity is a measurable enzymatic reaction, involving the hydrolysis of phosphodiester bonds of double-stranded DNA. The activity of a meganuclease acting on a particular DNA substrate is affected by the affinity or avidity of the meganuclease for that particular DNA substrate which is, in turn, affected by both sequence-specific and non-sequence-specific interactions with the DNA.

[1075] As used herein, the term “altered specificity,” when referencing to a meganuclease, means that a nuclease binds to and cleaves a recognition sequence, which is not bound to and cleaved by a reference nuclease (e.g., a wild-type) under physiological conditions, or that the rate of cleavage of a recognition sequence is increased or decreased by a biologically significant amount (e.g., at least 2×, or 2×-10×) relative to a reference nuclease.

[1076] As used herein, the terms “percent identity,” “sequence identity,” “percentage similarity,” “sequence similarity” and the like, with respect to both amino acid sequences and nucleic acid sequences, refer to a measure of the degree of similarity of two sequences based upon an alignment of the sequences that maximizes similarity between aligned amino acid residues or nucleotides, and which is a function of the number of identical or similar residues or nucleotides, the number of total residues or nucleotides, and the presence and length of gaps in the sequence alignment. A variety of algorithms and computer programs are available for determining sequence similarity using standard parameters. As used herein, sequence similarity is measured using the BLASTp program for amino acid sequences and the BLASTn program for nucleic acid sequences, both of which are available through the National Center for Biotechnology Information (www.ncbi.nlm.nih.gov/), and are described in, for example, Altschul et al. (1990), J. Mol. Biol. 215:403-410; Gish and States (1993), Nature Genet. 3:266-272; Madden et al. (1996), Meth. Enzymol. 266:131-141; Altschul et al. (1997), Nucleic Acids Res. 25:33 89-3402); Zhang et al. (2000), J. Comput. Biol. 7(1-2):203-14. As used herein, percent similarity of two amino acid sequences is the score based upon the following parameters for the BLASTp algorithm: word size=3; gap opening penalty=−11; gap extension penalty=−1; and scoring matrix=BLOSUM62. As used herein, percent similarity of two nucleic acid sequences is the score based upon the following parameters for the BLASTn algorithm: word size=11; gap opening penalty=−5; gap extension penalty=−2; match reward=1; and mismatch penalty=−3.

[1077] As used herein, the term “corresponding to” with respect to modifications of two proteins or amino acid sequences is used to indicate that a specified modification in the first protein is a substitution of the same amino acid residue as in the modification in the second protein, and that the amino acid position of the modification in the first protein corresponds to or aligns with the amino acid position of the modification in the second protein when the two proteins are subjected to standard sequence alignments (e.g., using the BLASTp program). Thus, the modification of residue “X” to amino acid “A” in the first protein will correspond to the modification of residue “Y” to amino acid “A” in the second protein if residues X and Y correspond to each other in a sequence alignment and despite the fact that X and Y may be different numbers.

[1078] As used herein, the term “recombinant DNA construct,” “recombinant construct,” “expression cassette,” “expression construct,” “chimeric construct,” “construct,” and “recombinant DNA fragment” are used interchangeably herein and are single or double-stranded polynucleotides. A recombinant construct comprises an artificial combination of nucleic acid fragments, including, without limitation, regulatory and coding sequences that are not found together in nature. For example, a recombinant DNA construct may comprise regulatory sequences and coding sequences that are derived from different sources, or regulatory sequences and coding sequences derived from the same source and arranged in a manner different than that found in nature. Such a construct may be used by itself or may be used in conjunction with a vector.

[1079] As used herein, the term “vector” or “recombinant DNA vector” may be a construct that includes a replication system and sequences that are capable of transcription and translation of a polypeptide-encoding sequence in a given host cell. If a vector is used, then the choice of vector is dependent upon the method that will be used to transform host cells as is well known to those skilled in the art. Vectors can include, without limitation, plasmid vectors and recombinant AAV vectors, or any other vector known in the art suitable for delivering a gene to a target cell. The skilled artisan is well aware of the genetic elements that must be present on the vector in order to successfully transform, select and propagate host cells comprising any of the isolated nucleotides or nucleic acid sequences of the invention. In some embodiments, a “vector” also refers to recombinant viral vector (e.g., a recombinant virus). Recombinant viral vectors (e.g., recombinant viruses) can include, without limitation, retroviral vectors (e.g., retroviruses), lentiviral vectors (e.g., lentiviruses), adenoviral vectors (e.g., adenoviruses), and adeno-associated viral vectors; (e.g., adeno-associated viruses (AAVs).

[1080] As used herein, the recitation of a numerical range for a variable is intended to convey that the present disclosure may be practiced with the variable equal to any of the values within that range. Thus, for a variable which is inherently discrete, the variable can be equal to any integer value within the numerical range, including the end-points of the range. Similarly, for a variable which is inherently continuous, the variable can be equal to any real value within the numerical range, including the end-points of the range. As an example, and without limitation, a variable which is described as having values between 0 and 2 can take the values 0, 1 or 2 if the variable is inherently discrete, and can take the values 0.0, 0.1, 0.01, 0.001, or any other real values ≥0 and ≤2 if the variable is inherently continuous.

### 2.1 Principle of the Invention

[1081] The present invention is based, in part, on the identification of positions and residues within I-CreI that can be modified to improve the cleavage activity for recognition sequences containing certain 4 base pair center sequences. There are four DNA bases (A, C, G, and T) and consequently 256 possible DNA sequences that are four base pairs in length. As described in WO2010/009147, these possible sequences are cleaved by engineered, I-CreI-derived meganucleases with differing efficiencies. Previously, it was thought that wild type I-CreI does not appreciably contact or otherwise interact with the four base pair center sequence and thus, it has not been previously contemplated that modification of residues within I-CreI could improve the cleavage efficiency and or specificity of a meganuclease for a recognition sequence having a given center sequence.

[1082] However, as described herein, it has been discovered that modifying particular residues in an I-CreI-derived meganuclease can improve the cleavage efficiency for recognition sequences having certain four base pair center sequences. Positions discovered to affect the ability of an I-CreI-derived meganuclease to cut a center sequence include those corresponding to positions 48, 50, 71, 72, 73, 73B, and 74 of I-CreI. Without being bound by any theory, it is thought that these sequences assist in the positioning of the DNA double helix, water molecules, and/or necessary metal co-factors within the meganuclease binding pocket (see crystal structure shown in FIG. 4). It is to be understood that the modification of residues within the hypervariable regions of the meganuclease does not appreciably affect cleavage of the center sequences described herein because these hypervariable region residues primarily interact with the DNA backbone allowing the meganuclease to bind to a specific 22-base pair recognition sequence. Accordingly, binding does not necessarily confer cleavage activity of the meganuclease. For example, given a recognition sequence having

[1083] TCAA as a center sequence, a meganuclease having unmodified residues at positions 48, 50, 71, 72, 73, 73B, and 74 corresponding to I-CreI described herein will bind to its recognition sequence but not cut the TCAA center sequence. Modification of one or more of residues 48, 50, 71, 72, 73, 73B, and 74 in that meganuclease as described herein will then confer or improve cleavage activity of that center sequence (e.g., TCAA).

[1084] As demonstrated herein, the modification of these particular residues has greatly increased the cleaving efficiency of recognition sequences having specific center sequences that previously were difficult to cleave. For example, the center sequences TTGA (reverse complement TCAA) and CCGT (reverse complement ACGG) were previously described as having a low efficiency of cutting by an engineered meganuclease (see, Arnould, et al. (2007). J. Mol. Biol. 371: 49-65 and WO 2010/009147). However, by making substitutions according to the invention, novel engineered meganucleases exhibited a 38-fold increase in cleavage of a recognition sequence comprising a TCAA (i.e., TTGA) center sequence, and a 21-fold increase in cleaving a recognition sequence comprising an ACGG (i.e., CCGT) center sequence (see Examples 23 and 7, respectively). Accordingly, the invention provides engineered meganucleases, derived from I-CreI, which have substitutions at particular positions, which increase the activity of the nucleases for recognition sequences containing certain four base pair center sequences. The invention also provides methods of cleaving double-stranded DNA using such engineered meganucleases. The invention further provides methods for improving the activity of engineered meganucleases for recognition sequences containing certain four base pair center sequences.

### 2.2 Engineered Meganucleases Optimized for Specific Center Sequences

[1085] It is known in the art that it is possible to use a site-specific nuclease to make a DNA break in the genome of a living cell, and that such a DNA break can result in permanent modification of the genome via homologous recombination with a transgenic DNA sequence. The use of nucleases to induce a double-strand break in a target locus is known to stimulate homologous recombination, particularly of transgenic DNA sequences flanked by sequences that are homologous to the genomic target. In this manner, exogenous nucleic acid sequences can be inserted into a target locus.

[1086] It is known in the art that it is possible to use a site-specific nuclease to make a DNA break in the genome of a living cell, and that such a DNA break can result in permanent modification of the genome via mutagenic NHEJ repair or via homologous recombination with a transgenic DNA sequence. NHEJ can produce mutagenesis at the cleavage site, resulting in inactivation of the allele. NHEJ-associated mutagenesis may inactivate an allele via generation of early stop codons, frameshift mutations producing aberrant non-functional proteins, or could trigger mechanisms such as nonsense-mediated mRNA decay. The use of nucleases to induce mutagenesis via NHEJ can be used to target a specific mutation or a sequence present in a wild-type allele. Further, the use of nucleases to induce a double-strand break in a target locus is known to stimulate homologous recombination, particularly of transgenic DNA sequences flanked by sequences that are homologous to the genomic target. In this manner, exogenous nucleic acid sequences can be inserted into a target locus. Such exogenous nucleic acids can encode any sequence or polypeptide of interest.

[1087] As disclosed herein, the nucleases used to practice the invention are meganucleases. In some embodiments, the nucleases used to practice the invention are single-chain meganucleases. A single-chain meganuclease comprises an N-terminal subunit and a C-terminal subunit joined by a linker peptide. Each of the two domains recognizes and binds to half of the recognition sequence (i.e., a recognition half-site) and the site of DNA cleavage is at the middle of the recognition sequence near the interface of the two subunits. DNA strand breaks are offset by four base pairs such that DNA cleavage by a meganuclease generates a pair of four base pair, 3′ single-strand overhangs. In some embodiments, engineered meganucleases of the invention have been engineered to bind and cleave recognition sequences with specific center sequences.

[1088] Engineered meganucleases of the invention comprise a first subunit, comprising a first hypervariable (HVR1) region, and a second subunit, comprising a second hypervariable (HVR2) region. Further, the first subunit binds to a first recognition half-site in the recognition sequence, and the second subunit binds to a second recognition half-site in the recognition sequence. In embodiments where the engineered meganuclease is a single-chain meganuclease, the first and second subunits can be oriented such that the first subunit, which comprises the HVR1 region and binds the first half-site, is positioned as the N-terminal subunit, and the second subunit, which comprises the HVR2 region and binds the second half-site, is positioned as the C-terminal subunit. In alternative embodiments, the first and second subunits can be oriented such that the first subunit, which comprises the HVR1 region and binds the first half-site, is positioned as the C-terminal subunit, and the second subunit, which comprises the HVR2 region and binds the second half-site, is positioned as the N-terminal subunit. As disclosed herein, certain modifications to the meganuclease (e.g., at positions 48, 50, 71, 72, 73, 73B, and 74) confer increased cleavage of recognition sequences having certain four base pair center sequences. Exemplary engineered meganucleases of the invention, which demonstrate improve cleavage of recognition sequences comprising certain center sequences are provided in SEQ ID NOs: 11-33, 36-43, 46-67, 70-89, 92-118, 121-135, 138-156, 159-183, 186-199, 202-219, 222-243, 246-247, 250-266, 269-291, 294-313, 316-325, 328-330, 333-340, 343-357, 360-389, 392-399, 402-433, 436-462, 465-495, 498-501, and 504-529.

[1089] In specific embodiments, an engineered meganuclease of the invention is a homodimer or heterodimer, wherein each of the two subunits of the dimer is derived from SEQ ID NO: 1 (i.e., I-CreI). Engineered meganucleases disclosed herein can comprise modifications (e.g., substitutions) in a single subunit, or modifications in both subunits, which confer increased activity (e.g., increased cleavage activity) of the engineered meganuclease for a recognition sequence comprising a specific center sequence.

[1090] In some examples, a first or second subunit of an I-CreI-derived meganuclease may have at least 70%, at least 75%, at least 80%, at least 81%, at least 82%, at least 83%, at least 84%, at least 85%, at least 86%, at least 87%, at least 88%, at least 89% at least 90%, at least 91%, at least 92%, at least 93%, at least 94%, at least 96%, at least 97%, at least 98%, at least 99%, or at least 99.5% sequence identity to a wild-type I-CreI (SEQ ID NO: 1). In some embodiments, a first and/or second subunit of any of the disclosed engineered meganucleases may have at least 75%, at least 80%, at least 85%, at least 88%, at least 90%, at least 92%, at least 94%, at least 96%, at least 97%, at least 98%, or at least 99% sequence identity to SEQ ID NO: 1, with the exception of an amino acid substitution at one or more positions corresponding to positions 48, 50, 71, 72, 73, and 74 of SEQ ID NO: 1.

[1091] In some embodiments, a first and/or second subunit of any of the disclosed engineered meganucleases may have at least 75%, at least 80%, at least 85%, at least 88%, at least 90%, at least 92%, at least 94%, at least 96%, at least 97%, at least 98%, or at least 99% sequence identity to SEQ ID NO: 1, with the exception of an amino acid substitution at one or more positions corresponding to positions 48, 50, 71, 72, 73, 73B, and 74 of SEQ ID NO: 1. In particular embodiments, at least one of the first or second subunit comprises at least 85% sequence identity to SEQ ID NO: 1 with the exception of an amino acid substitution at one or more positions corresponding to positions 48, 50, 71, 72, 73, 73B, and 74 of SEQ ID NO: 1.

[1092] In some embodiments, the substitution at one or more positions of the first and/or second subunit of the disclosed engineered meganucleases corresponding to positions 48, 50, 71, 72, 73, 73B, and 74 of SEQ ID NO: 1 is a conservative substitution, such as exchanging one amino acid with another having similar properties. In some embodiments, one or more of the charged amino acids at these positions (e.g., K48) is substituted with a similarly charged amino acid. In some embodiments, one or more of the polar amino acids at these positions (e.g., Q50, S72 and S74) is substituted with a similarly polar amino acid. In some embodiments, one or more of the charged hydrophobic acids at these positions (e.g., G41 and V73) is substituted with a similarly hydrophobic amino acid.

[1093] In some embodiments, the substitutions at one or more positions of the first and/or second subunit of the disclosed engineered meganucleases comprises substitutions at two, three or more than three amino acid positions corresponding to positions 48, 50, 71, 72, 73, 73B, and 74 of SEQ ID NO: 1. In some embodiments, two substitutions are made at positions corresponding to positions 48 and 50 of SEQ ID NO: 1. Without being bound to a particular theory, amino acid positions 48 and 40 of SEQ ID NO: 1 are believed to form a coordination series with water and a magnesium ion. In some embodiments, three or four substitutions are made at positions corresponding to positions 71, 72, 73, and 74 of SEQ ID NO: 1. Without being bound to a particular theory, amino acid positions 71-74 of SEQ ID NO: 1 (which are exposed at the surface of the protein as a loop) are believed to act in concert.

[1094] In particular examples, the engineered meganuclease is a single-chain meganuclease, wherein the first subunit and the second subunit are covalently joined by a polypeptide linker.

[1095] In some embodiments, the polypeptide linker is according to SEQ ID NO: 530.

[1096] In specific embodiments, the first subunit, the second subunit, or both subunits can comprise a substitution at one or more positions corresponding to positions 48, 50, 71, 72, 73, 73B, and 74 of wild-type I-CreI (SEQ ID NO: 1). Despite previous reports that I-CreI-derived meganucleases do not interact with the four base pair center sequence, it has been demonstrated herein that modifications at one or more of these positions can increase the activity (e.g., cleavage activity) of the nuclease for a recognition sequence comprising a specific center sequence. It is further disclosed herein that substitutions can be made at additional positions in the first and/or second subunit, which further optimize the engineered meganuclease for a recognition sequence having a specific center sequence.

[1097] When generating an I-CreI-derived meganuclease that is optimized for a recognition sequence having a specific center sequence, one or more residues corresponding to positions 48, 50, 71, 72, 73, 73B, and 74 of I-CreI (SEQ ID NO: 1) are modified. Tables 1-90 below describe positions and residues which have been exemplified herein. As shown, residues and positions for a “first subunit” refer to modifications of the subunit of the engineered meganuclease, which binds, interacts with or recognizes (e.g., binds, makes contact, or is generally positioned around and coordinates water and metal cofactors) the half-site of the recognition sequence that is 5′ upstream of positions +1 and +2 of a center sequence. Similarly, residues and positions for a “second subunit” refer to modifications of the subunit of the engineered meganuclease, which interacts with (e.g., binds, makes contact, or is generally positioned around and coordinates water and metal cofactors) the half-site of the recognition sequence that is 3′ downstream of positions +3 and +4 of a center sequence.

[1098] In each table below, the term “I-CreI Position” refers to the position of the residue as found in the wild-type I-CreI monomer. The term “EN Position” refers to the actual numerical position of a residue, which corresponds to the wild-type I-CreI residue, in an exemplified engineered meganuclease. For example, in an exemplified engineered meganuclease, nuclease position 239 is within the second subunit and can correspond to position 48 of wild-type I-CreI. In some examples, an amino acid is inserted into the engineered nuclease sequence and the numbering of the nuclease positions changes accordingly. In such cases, the same residues correspond to the wild-type I-CreI residues, even though their numbering in the engineered meganuclease has changed. For example, in some cases an R residue is inserted after position 73 of an engineered meganuclease, referred herein to as 73B or 264B. This causes the residue at position 74 to be at new position 75. In such cases, position 75 still corresponds to the position 74 of wild-type I-CreI.

[1099] In some embodiments, the disclosed engineered I-CreI-derived meganucleases bind and cleave a recognition sequence comprising a center sequence selected from the group consisting of ACXX, TTXX, GCXX, and TCXX; a recognition sequence selected from XXTT, XXCT, XXAT, XXTC, XXGC, XXGG, and XXGT; or a recognition sequence selected from XXTT, XXCT, XXAT, XXTC, XXGC, XXGG, and XXGT, wherein X represents a nucleotide selected from A, G, C, or T.

[1100] In some embodiments, the disclosed engineered I-CreI-derived meganucleases bind and cleave a recognition sequence comprising a center sequence selected from the group consisting of ACAA, ACAG, ACAT, ACGA, ACGC, ACGG, ACGT, ATAA, ATAG, ATAT, ATGA, ATGG, TTGG, GCAA, GCAT, GCGA, GCAG, TCAA, and TTAA. In particular embodiments, the disclosed engineered meganucleases bind and cleave a recognition sequence selected from ACAA, ACAG, ACAT, ACGC, ACGG, and ACGT. In particular embodiments, the disclosed engineered meganucleases bind and cleave a recognition sequence selected from ATAA, ATAG, ATAT, ATGA, and ATGG. In particular embodiments, the disclosed engineered meganucleases bind and cleave a recognition sequence selected from GCAA, GCAT, GCGA, and GCAG. In particular embodiments, the disclosed engineered meganucleases bind and cleave the recognition sequence TTGG or TTAA.

[1101] In particular embodiments, the disclosed engineered meganucleases bind and cleave a recognition sequence selected from ACAA, TTGG, and GTAT.

[1102] Tables are provided below for each center sequence. Some tables provide the identified or exemplified residues at one or more positions in a subunit that correspond to positions 48, 50, 71, 72, 73, 73B, and 74 of I-CreI (e.g., Tables 1 and 3 for ACAA). Some tables provide residues at one or more additionally identified or exemplified positions that can be introduced into a subunit when targeting a specific center sequence (e.g., Tables 2 and 4 for ACAA).

TABLE 1
Exemplified Residues for ACAA Center Sequence (First Subunit)

| | | | | |
|---|---|---|---|---|
| I-CreI Position | 48 | 50 | 71 | 72 |
| EN Position | 48 | 50 | 71 | 72 |
| Residue(s) | K, L | C, R, T, K, S | G, R | R, Q |

TABLE 2
Exemplified Residues for ACAA Center Sequence (First Subunit)

| | | | |
|---|---|---|---|
| I-CreI Position | 19 | 80 | 139 |
| EN Position | 19 | 80 | 139 |
| Residue(s) | A, G | Q, E | K, R |

TABLE 3
Additionally Exemplified Residues for
ACAA Center Sequence (Second Subunit)

| | | | | | | |
|---|---|---|---|---|---|---|
| I-CreI Position | 48 | 50 | 71 | 72 | 73 | 74 |
| EN Position | 239 | 241 | 262 | 263 | 264 | 265 |
| Residue(s) | K, T, | C, R, E, | G, A | T, R, S, P, | V, I | S, T, A |
| | S,A | K, T | | N, G, A | | |

TABLE 4
Additionally Exemplified Residues for
ACAA Center Sequence (Second Subunit)

| | | | | | | |
|---|---|---|---|---|---|---|
| I-CreI Position | 19 | 66 | 80 | 92 | 117 | 139 |
| EN Position | 210 | 257 | 271 | 283 | 308 | 330 |
| Residue(s) | G, A, S | Y, C | Q, E | Q, R | E, G | K, R |

TABLE 5
Exemplified Residues for ACAG Center Sequence (First Subunit)

| | | | | |
|---|---|---|---|---|
| I-CreI Position | 50 | 71 | 72 | 73 |
| EN Position | 50 | 71 | 72 | 73 |
| Residue(s) | R | G, R | R, K, Q, P, T | A, C |

TABLE 6
Additionally Exemplified Residues for
ACAG Center Sequence (First Subunit)

| | | | | |
|---|---|---|---|---|
| I-CreI Position | 19 | 54 | 80 | |
| EN Position | 19 | 54 | 80 | 158 |
| Residue(s) | A, G | F, I, L | Q, E | S, P |

TABLE 7
Exemplified Residues for ACAG Center
Sequence (Second Subunit)

| | | | | | |
|---|---|---|---|---|---|
| I-CreI Position | 50 | 71 | 72 | 73 | 73B |
| EN Position | 241 | 262 | 263 | 264 | |
| +1 AA* | 241 | 262 | 263 | 264 | 264B* |
| Residue(s) | C | S, D, G | R, G | R | R or no R |

*Refers to engineered meganucleases having an insertion following a position which corresponds to position 73 of I-CreI.

TABLE 8
Additionally Exemplified Residues for
ACAG Center Sequence (Second Subunit)

| | | | | | | |
|---|---|---|---|---|---|---|
| I-CreI Position | 19 | 59 | 66 | 80 | 81 | 139 |
| EN Position | 210 | 250 | 257 | 271 | 272 | 330 |
| +1 AA* | 210 | 250 | 257 | 272* | 273* | 331* |
| Residue(s) | G, A, S | V, A | Y, H | Q | I, T | K, R |

*Refers to engineered meganucleases having an insertion following a position which corresponds to position 73 of I-CreI.

TABLE 9
Exemplified Residues for ACAT Center Sequence (First Subunit)

| | | | | | |
|---|---|---|---|---|---|
| I-CreI Position | 48 | 50 | 71 | 72 | 73 |
| EN Position | 48 | 50 | 71 | 72 | 73 |
| Residue(s) | K, S, I, L, N | Q, S, R, K | G, R | R, T | A, G |

TABLE 10
Additionally Exemplified Residues for
ACAT Center Sequence (First Subunit)

| | | | | |
|---|---|---|---|---|
| I-CreI Position | 19 | 54 | 80 | 139 |
| EN Position | 19 | 54 | 80 | 139 |
| Residue(s) | A, G, S | F, I | Q, E | K, H, R |

TABLE 11
Exemplified Residues for ACAT Center
Sequence (Second Subunit)

| | | | | | | |
|---|---|---|---|---|---|---|
| I-CreI Position | 48 | 50 | 71 | 72 | 73 | 74 |
| EN Position | 239 | 241 | 262 | 263 | 264 | 265 |
| Residue(s) | H, T, | S, K, | S, G, | T, K, | H, A, | S, C, |
| | G, A, | C, N, | R, T, | A, S, | C, S, | A |
| | S, L, | R, G, | K, E | R, H, | G, R | |
| | K | Q | | G, N | | |

TABLE 12
Additionally Exemplified Residues for
ACAT Center Sequence (Second Subunit)

| | | | | | | |
|---|---|---|---|---|---|---|
| I-CreI Position | 19 | 80 | 81 | 83 | 117 | 139 |
| EN Position | 210 | 271 | 272 | 274 | 308 | 330 |
| Residue(s) | A, G, S | Q, E | I, T | P, H | E, G | K, R, |
| | | | | | | T, H |

TABLE 13
Exemplified Residues for ACGA Center Sequence (First Subunit)

| | | | | | |
|---|---|---|---|---|---|
| I-CreI Position | 48 | 50 | 71 | 72 | 73 |
| EN Position | 48 | 50 | 71 | 72 | 73 |
| Residue(s) | K | V, R, T, W, A | G, P | R, P | A |

[1103] Table 14. Additionally Exemplified Residues for ACGA Center Sequence (First Subunit)

TABLE 14
Additionally Exemplified Residues for
ACGA Center Sequence (First Subunit)

| | | | |
|---|---|---|---|
| I-CreI Position | 19 | 80 | 139 |
| EN Position | 19 | 80 | 139 |
| Residue(s) | A, G, S | Q, E | K, R |

TABLE 15
Exemplified Residues for ACGA Center
Sequence (Second Subunit)

| | | | | | | |
|---|---|---|---|---|---|---|
| I-CreI Position | 48 | 50 | 71 | 72 | 73 | 74 |
| EN Position | 239 | 241 | 262 | 263 | 264 | 265 |
| Residue(s) | K, H, | R, S, | G | R, H | I, V | S, A |
| | T, A, | C, I, | | | | |
| | G, Q | V, G | | | | |

TABLE 16
Additionally Exemplified Residues for
ACGA Center Sequence (Second Subunit)

| | | | |
|---|---|---|---|
| I-CreI Position | 19 | 80 | 139 |
| EN Position | 210 | 271 | 330 |
| Residue(s) | A, G | Q, E | K, R |

TABLE 17
Exemplified Residues for ACGC Center Sequence (First Subunit)

| | | | | | |
|---|---|---|---|---|---|
| I-CreI Position | 48 | 50 | 71 | 72 | 73 |
| EN Position | 48 | 50 | 71 | 72 | 73 |
| Residue(s) | K, H, Q, | Q, R, K, | G, R, A | R, P, H | A |
| | L, A, S | S, T, C | | | |

TABLE 18
Additionally Exemplified Residues for
ACGC Center Sequence (First Subunit)

| | | |
|---|---|---|
| I-CreI Position | 19 | 80 |
| EN Position | 19 | 80 |
| Residue(s) | A, G, S | Q, E |

TABLE 19
Exemplified Residues for ACGC Center
Sequence (Second Subunit)

| | | | | | | |
|---|---|---|---|---|---|---|
| I-CreI Position | 48 | 50 | 71 | 72 | 73 | 74 |
| EN Position | 239 | 241 | 262 | 263 | 264 | 265 |
| Residue(s) | H, K, | S, E, | S, G, | T, R, | H, T, | S, A, |
| | L, A, | K, I, | K, A, | A, S, | V, I, | T |
| | S, N | N, V | R | H, G | C | |

TABLE 20
Additionally Exemplified Residues for
ACGC Center Sequence (Second Subunit)

| | | | | |
|---|---|---|---|---|
| I-CreI Position | 19 | 80 | 87 | 139 |
| EN Position | 210 | 271 | 278 | 330 |
| Residue(s) | A, G | Q, E | F, L | K, R, N, H, A |

TABLE 21
Exemplified Residues for ACGG Center Sequence (First Subunit)

| | | | |
|---|---|---|---|
| I-CreI Position | 50 | 72 | 73 |
| EN Position | 50 | 72 | 73 |
| Residue(s) | R, K | R | A |

TABLE 22
Additionally Exemplified Residues for
ACGG Center Sequence (First Subunit)

| | | |
|---|---|---|
| I-CreI Position | 54 | 80 |
| EN Position | 54 | 80 |
| Residue(s) | F, L | Q |

TABLE 23
Exemplified Residues for ACGG Center
Sequence (Second Subunit)

| | | | | | | |
|---|---|---|---|---|---|---|
| I-CreI Position | 48 | 50 | 71 | 72 | 73 | |
| EN Position | 239 | 241 | 262 | 263 | 264 | |
| +1 AA* | 239 | 241 | 262 | 263 | 264 | 264B* |
| Residue(s) | K | R, P | D | G | R, G | R |

*Refers to engineered meganucleases having an insertion following a position which corresponds to position 73 of I-CreI.

TABLE 24
Additionally Exemplified Residues for
ACGG Center Sequence (Second Subunit)

| | | |
|---|---|---|
| I-CreI Position | 19 | 80 |
| EN Position | 210 | 271 |
| +1 AA* | 210 | 272* |
| Residue(s) | A | Q |

*Refers to engineered meganucleases having an insertion following a position which corresponds to position 73 of I-CreI.

TABLE 25
Exemplified Residues for ACGT Center Sequence (First Subunit)

| | | | | | |
|---|---|---|---|---|---|
| I-CreI Position | 48 | 50 | 71 | 72 | 73 |
| EN Position | 48 | 50 | 71 | 72 | 73 |
| Residue(s) | K, L, S, H | Q, R, C, S, V | G | R | A |

TABLE 26
Additionally Exemplified Residues for
ACGT Center Sequence (First Subunit)

| | | | |
|---|---|---|---|
| I-CreI Position | 19 | 80 | 139 |
| EN Position | 19 | 80 | 139 |
| Residue(s) | A, G | Q, E | K, R |

TABLE 27
Exemplified Residues for ACGT Center
Sequence (Second Subunit)

| | | | | | | |
|---|---|---|---|---|---|---|
| I-CreI Position | 48 | 50 | 71 | 72 | 73 | 74 |
| EN Position | 239 | 241 | 262 | 263 | 264 | 265 |
| Residue(s) | H, K, | S, C, | S, P, G, | T, R, | H, C, | S, A, |
| | L, S | Q, E, | T, A, R, | K, A | A, S | T |
| | | A | N | | | |

TABLE 28
Additionally Exemplified Residues for
ACGT Center Sequence (Second Subunit)

| | | | | |
|---|---|---|---|---|
| I-CreI Position | 19 | 80 | 85 | 139 |
| EN Position | 210 | 271 | 276 | 330 |
| Residue(s) | A, G | Q, E | H, Y | K, R |

TABLE 29
Exemplified Residues for ATAA Center Sequence (First Subunit)

| | | | | | | |
|---|---|---|---|---|---|---|
| I-CreI Position | 48 | 50 | 71 | 72 | 73 | 74 |
| EN Position | 48 | 50 | 71 | 72 | 73 | 74 |
| Residue(s) | K, A, | Q, T, R, | G, K, | R, A, G, | A, T, | S, A |
| | H, S, | I, G, K, | S, H | Q, H, L, | C | |
| | L, Q | D, C, V | N | S | | |

TABLE 30
Additionally Exemplified Residues for
ATAA Center Sequence (First Subunit)

| | | | | |
|---|---|---|---|---|
| I-CreI Position | 19 | 80 | 100 | 139 |
| EN Position | 19 | 80 | 100 | 139 |
| Residue(s) | A, G, S | K, A, H, | Q, T, R, I, G, K, | G, K, S, H, N |
| | | S, L, Q | D, C, V | |

TABLE 31
Exemplified Residues for ATAA Center
Sequence (Second Subunit)

| | | | | | | |
|---|---|---|---|---|---|---|
| I-CreI Position | 48 | 50 | 71 | 72 | 73 | 74 |
| EN Position | 239 | 241 | 262 | 263 | 264 | 265 |
| Residue(s) | S, T, A, | R, K, | S, G, | T, R, Q, | I, C, | S, A, |
| | K, N | E, A, | K, R | G, A, Y, | V | T |
| | | C, T | | S, N, K | | |

TABLE 32
Additionally Exemplified Residues for
ATAA Center Sequence (Second Subunit)

| | | | | | |
|---|---|---|---|---|---|
| I-CreI Position | 19 | 59 | 80 | 118 | 139 |
| EN Position | 210 | 250 | 271 | 309 | 330 |
| Residue(s) | G, S, A | V, A | Q, E | S, F | K, R |

TABLE 33
Exemplified Residues for ATAG Center Sequence (First Subunit)

| | | | | | |
|---|---|---|---|---|---|
| I-CreI Position | 48 | 50 | 71 | 72 | 73 |
| EN Position | 48 | 50 | 71 | 72 | 73 |
| Residue(s) | K, H | R | G, R, H | R, G, S, A, P, Q | A, C |

TABLE 34
Additionally Exemplified Residues for
ATAG Center Sequence (First Subunit)

| | | | |
|---|---|---|---|
| I-CreI Position | 19 | 80 | 139 |
| EN Position | 19 | 80 | 139 |
| Residue(s) | A, G | Q, E | K, R |

TABLE 35
Exemplified Residues for ATAG Center
Sequence (Second Subunit)

| | | | |
|---|---|---|---|
| I-CreI Position | 50 | 72 | 73 |
| EN Position | 241 | 263 | 264 |
| Residue(s) | C, R | G, S | R |

TABLE 36
Additionally Exemplified Residues for
ATAG Center Sequence (Second Subunit)

| | | | | | |
|---|---|---|---|---|---|
| I-CreI Position | 19 | 36 | 59 | 80 | 139 |
| EN Position | 210 | 227 | 250 | 271 | 330 |
| Residue(s) | G, A | K, R | V, A | Q | K, R |

TABLE 37
Exemplified Residues for ATAT Center Sequence (First Subunit)

| | | | | | |
|---|---|---|---|---|---|
| I-CreI Position | 48 | 50 | 71 | 72 | 73 |
| EN Position | 48 | 50 | 71 | 72 | 73 |
| Residue(s) | K, H, C, | Q, N, C, R, | G, H, I | R, A, | A, C, S |
| | A, S, D, T | K, S, T, V | | N, Q | |

TABLE 38
Additionally Exemplified Residues for
ATAT Center Sequence (First Subunit)

| | | | |
|---|---|---|---|
| I-CreI Position | 19 | 80 | 139 |
| EN Position | 19 | 80 | 139 |
| Residue(s) | A, G | Q, E | K, R, S |

TABLE 39
Exemplified Residues for ATAT Center
Sequence (Second Subunit)

| | | | | | | |
|---|---|---|---|---|---|---|
| I-CreI Position | 48 | 50 | 71 | 72 | 73 | 74 |
| EN Position | 239 | 241 | 262 | 263 | 264 | 265 |
| Residue(s) | H, K, | S, C, | S, K, | T, A, R, | H, C, | S, C, |
| | A, S, | K, R, | E, I, | S, K, G, | A, S, | A |
| | R, T | Q, N | G, R | N | G | |

TABLE 40
Additionally Exemplified Residues for
ATAT Center Sequence (Second Subunit)

| | | | | |
|---|---|---|---|---|
| I-CreI Position | 19 | 59 | 80 | 139 |
| EN Position | 210 | 250 | 271 | 330 |
| Residue(s) | G, A, | V, A | Q, E, K | K, R, P, N |

TABLE 41
Exemplified Residues for ATGA Center Sequence (First Subunit)

| | | | | |
|---|---|---|---|---|
| I-CreI Position | 48 | 50 | 72 | 73 |
| EN Position | 48 | 50 | 72 | 73 |
| Residue(s) | K, A, H, L | R, T, E, | R, T, S, | A, S |
| | | S, C, V | A, K | |

TABLE 42
Additionally Exemplified Residues for
ATGA Center Sequence (First Subunit)

| | | | | | |
|---|---|---|---|---|---|
| I-CreI Position | 19 | 80 | 87 | 92 | 139 |
| EN Position | 19 | 80 | 87 | 92 | 139 |
| Residue(s) | A, G, S | Q, E | F, L | Q, R | K, R |

TABLE 43
Exemplified Residues for ATGA Center
Sequence (Second Subunit)

| | | | | | |
|---|---|---|---|---|---|
| I-CreI Position | 48 | 50 | 72 | 73 | 74 |
| EN Position | 239 | 241 | 263 | 264 | 265 |
| Residue(s) | H, K, R, | S, I, R, | R, H | I, V | S, A, T |
| | A, S | C, A, Q | | | |

TABLE 44
Additionally Exemplified Residues for
ATGA Center Sequence (Second Subunit)

| | | | | |
|---|---|---|---|---|
| I-CreI Position | 19 | 59 | 80 | 139 |
| EN Position | 210 | 250 | 271 | 330 |
| Residue(s) | G, A, S | V, A | Q, E | K, R |

TABLE 45
Exemplified Residues for ATGG Center Sequence

| | | | | | |
|---|---|---|---|---|---|
| I-CreI Position | 50 | 71 | 72 | 73 | 74 |
| EN Position | 48 | 50 | 72 | 73 | 74 |
| Residue(s) | R | G, S | P, G | A, C | S, C |

### Table 46. Additionally Exemplified Residues for ATGG Center Sequence (First Subunit)

TABLE 46
Additionally Exemplified Residues for
ATGG Center Sequence (First Subunit)

| | | | | |
|---|---|---|---|---|
| I-CreI Position | 19 | 80 | 82 | 139 |
| EN Position | 19 | 80 | 87 | 92 |
| Residue(s) | G, A | E, Q | E, K | R, K |

TABLE 47
Exemplified Residues for ATGG Center
Sequence (Second Subunit)

| | | | | | | |
|---|---|---|---|---|---|---|
| I-CreI Position | 48 | 50 | 71 | 72 | 73 | |
| EN Position | 239 | 241 | 262 | 263 | 264 | |
| +1 AA* | 239 | 241 | 262 | 263 | 264 | 264B |
| Residue(s) | K | R | D, G | G | R | R or no |
| | | | | | | R |

*Refers to engineered meganucleases having an insertion following a position which corresponds to position 73 of I-CreI.

TABLE 48
Additionally Exemplified Residues for
ATGG Center Sequence (Second Subunit)

| | | | |
|---|---|---|---|
| I-CreI Position | 19 | 77 | 80 |
| EN Position | 210 | 268 | 271 |
| +1 AA* | 210 | 269 | 272 |
| Residue(s) | A, G | N | Q, R |

*Refers to engineered meganucleases having an insertion following a position which corresponds to position 73 of I-CreI.

TABLE 49
Exemplified Residues for GCAA Center Sequence (First Subunit)

| | | | | | |
|---|---|---|---|---|---|
| I-CreI Position | 48 | 50 | 71 | 72 | 73 |
| EN Position | 48 | 50 | 71 | 72 | 73 |
| Residue(s) | K, H | R, C, K, | G, N, T, | R, P, S, N, Q, | T, V |
| | | T, L | R, S, H | G, A, M, V, T | |

TABLE 50
Additionally Exemplified Residues for
GCAA Center Sequence (First Subunit)

| | | | |
|---|---|---|---|
| I-CreI Position | 19 | 80 | 139 |
| EN Position | 19 | 80 | 139 |
| Residue(s) | A, G, S | Q, E | K, R |

TABLE 51
Exemplified Residues for GCAA Center
Sequence (Second Subunit)

| | | | | | | |
|---|---|---|---|---|---|---|
| I-CreI Position | 48 | 50 | 71 | 72 | 73 | 74 |
| EN Position | 239 | 241 | 262 | 263 | 264 | 265 |
| Residue(s) | S, A, | R, C, | G, R, | T, G, S, | C, V, | S, A, |
| | K, T | T, K, | A, H | A, E, N, | I | T |
| | | E | | K, H, R, | | |
| | | | | C, Y | | |

TABLE 52
Additionally Exemplified Residues for
GCAA Center Sequence (Second Subunit)

| | | | | |
|---|---|---|---|---|
| I-CreI Position | 19 | 31 | 80 | 139 |
| EN Position | 210 | 222 | 271 | 330 |
| Residue(s) | G, A | Q, P | Q, E | K, R |

TABLE 53
Exemplified Residues for GCAT Center Sequence (First Subunit)

| | | | | | | |
|---|---|---|---|---|---|---|
| I-CreI Position | 48 | 50 | 71 | 72 | 73 | 74 |
| EN Position | 48 | 50 | 71 | 72 | 73 | 74 |
| Residue(s) | K, A, | Q, V, | G, A, H, | R, T, G, | A, T, | S, |
| | H, R | R, K, | R, T, N, | S, Q, N, | V, C | A |
| | | S | S | A | | |

TABLE 54
Additionally Exemplified Residues for
GCAT Center Sequence (First Subunit)

| | | | | |
|---|---|---|---|---|
| I-CreI Position | 19 | 80 | 139 | 143 |
| EN Position | 19 | 80 | 139 | 143 |
| Residue(s) | A, G | Q, E | K, H, R | T, I |

TABLE 55
Exemplified Residues for GCAT Center
Sequence (Second Subunit)

| | | | | | | |
|---|---|---|---|---|---|---|
| I-CreI Position | 48 | 50 | 71 | 72 | 73 | 74 |
| EN Position | 239 | 241 | 262 | 263 | 264 | 265 |
| Residue(s) | H, A, | S, R, | S, K, R, | T, A, G, | H, C, | S, C, |
| | K, T, | K, Q, | A, G, T, | N, S, R, | G, S, | A |
| | L, I | H, V | H, Y | H, Q, K | A | |

TABLE 56
Additionally Exemplified Residues for
GCAT Center Sequence (Second Subunit)

| | | | | |
|---|---|---|---|---|
| I-CreI Position | 19 | 80 | 125 | 139 |
| EN Position | 210 | 271 | 316 | 330 |
| Residue(s) | G, S, A | Q, E | V, A | K, R, H |

TABLE 57
Exemplified Residues for GCGA Center Sequence (First Subunit)

| | | | | | |
|---|---|---|---|---|---|
| I-CreI Position | 50 | 71 | 72 | 73 | 74 |
| EN Position | 50 | 71 | 72 | 73 | 74 |
| Residue(s) | K, R | G, R, S, | R, N, G, | V, T, I | S, A |
| | | A, N | A, Q | | |

TABLE 58
Additionally Exemplified Residues for
GCGA Center Sequence (First Subunit)

| | | |
|---|---|---|
| I-CreI Position | 19 | 80 |
| EN Position | 19 | 80 |
| Residue(s) | A, G, S | Q, E |

TABLE 59
Exemplified Residues for GCGA Center
Sequence (Second Subunit)

| | | | | | |
|---|---|---|---|---|---|
| I-CreI Position | 48 | 50 | 72 | 73 | 74 |
| EN Position | 239 | 241 | 263 | 264 | 265 |
| Residue(s) | K, T, S, A, Q | C, R | R | V, I | S, A |

TABLE 60
Additionally Exemplified Residues for
GCGA Center Sequence (Second Subunit)

| | | | |
|---|---|---|---|
| I-CreI Position | 19 | 80 | 139 |
| EN Position | 210 | 271 | 330 |
| Residue(s) | G, S, A | Q, E | R |

TABLE 61
Exemplified Residues for GTAA Center Sequence (First Subunit)

| | | | | | | |
|---|---|---|---|---|---|---|
| I-CreI Position | 48 | 50 | 71 | 72 | 73 | 74 |
| EN Position | 48 | 50 | 71 | 72 | 73 | 74 |
| Residue(s) | K, S, | T, R, | G, R, S, | R, S, C, | V, C, | S, A, |
| | A, R, | A, K, | T, A, N, | N, K, A, | I, T | T |
| | N, T | C | H, K | H, G, T, | | |
| | | | | D, Y, P, | | |
| | | | | Q | | |

TABLE 62
Additionally Exemplified Residues for
GTAA Center Sequence (First Subunit)

| | | | |
|---|---|---|---|
| I-CreI Position | 19 | 80 | 139 |
| EN Position | 19 | 80 | 139 |
| Residue(s) | A, S | Q, E | K, R |

TABLE 63
Exemplified Residues for GTAG Center Sequence (First Subunit)

| | | | | |
|---|---|---|---|---|
| I-CreI Position | 50 | 71 | 72 | 73 |
| EN Position | 50 | 71 | 72 | 73 |
| Residue(s) | R, C | D, S | G, N | R |

TABLE 64
Additionally Exemplified Residues for
GTAG Center Sequence (First Subunit)

| | | | |
|---|---|---|---|
| I-CreI Position | 19 | 80 | 139 |
| EN Position | 19 | 80 | 139 |
| Residue(s) | A, S | Q | K, R |

TABLE 65
Exemplified Residues for GTAT Center Sequence (First Subunit)

| | | | | | | |
|---|---|---|---|---|---|---|
| I-CreI Position | 48 | 50 | 71 | 72 | 73 | 74 |
| EN Position | 48 | 50 | 71 | 72 | 73 | 74 |
| Residue(s) | K, G, | Q, V, | G, T, | R, K, | A, C, | S, A, |
| | T, A, | R, S, | A, K, | S, Y, | S, T | C |
| | M, H, | T, G, | H, R, | N, T, | | |
| | S, L, | K, C, | Y, L, | G, W, | | |
| | R | L | S, N | H, A | | |

TABLE 66
Additionally Exemplified Residues for
GTAT Center Sequence (First Subunit)

| | | | |
|---|---|---|---|
| I-CreI Position | 19 | 80 | 139 |
| EN Position | 19 | 80 | 139 |
| Residue(s) | A, S | Q, E | K, R, T, H |

TABLE 67
Exemplified Residues for GTGA Center Sequence (First Subunit)

| | | | | | | |
|---|---|---|---|---|---|---|
| I-CreI Position | 48 | 50 | 71 | 72 | 73 | 74 |
| EN Position | 48 | 50 | 71 | 72 | 73 | 74 |
| Residue(s) | K, A, | R, V, | G, R, | R, T, | A, V, | S, T, |
| | G, R, | C, S | V, S, | S, G, | T | A, G |
| | S, H | | A, T, | H, K, | | |
| | | | N, D, | Y | | |
| | | | H | | | |

TABLE 68
Additionally Exemplified Residues for
GTGA Center Sequence (First Subunit)

| | | | |
|---|---|---|---|
| I-CreI Position | 19 | 80 | 139 |
| EN Position | 19 | 80 | 139 |
| Residue(s) | A, S | Q, E | K, R |

TABLE 69
Exemplified Residues for GTGC Center Sequence (First Subunit)

| | | | | | | |
|---|---|---|---|---|---|---|
| I-CreI Position | 48 | 50 | 71 | 72 | 73 | 74 |
| EN Position | 48 | 50 | 71 | 72 | 73 | 74 |
| Residue(s) | K, L, | R, S, | G, S, N, | R, K, G, | A, V, | S, A, |
| | H, A, | V, K, | I, R, A, | H, P, S, | T, N, | T |
| | R, N, | I, G | E, Q, Y, | C, N, T, | C, L | |
| | S | | T, K, F, | A, M, D, | | |
| | | | V | Q | | |

TABLE 70
Additionally Exemplified Residues for
GTGC Center Sequence (First Subunit)

| | | | |
|---|---|---|---|
| I-CreI Position | 19 | 80 | 139 |
| EN Position | 19 | 80 | 139 |
| Residue(s) | A, S | Q, E | K, T, S, |
| | | | R, H, V |

TABLE 11
Exemplified Residues for GTGG Center Sequence (First Subunit)

| | | | | |
|---|---|---|---|---|
| I-CreI Position | 50 | 71 | 72 | 73 |
| EN Position | 50 | 71 | 72 | 73 |
| Residue(s) | Q, R | G, S, D | G, S | R, V |

TABLE 72
Additionally Exemplified Residues for
GTGG Center Sequence (First Subunit)

| | | | |
|---|---|---|---|
| I-CreI Position | 19 | 62 | 80 |
| EN Position | 19 | 62 | 80 |
| Residue(s) | A, G, S | I, V | Q, E |

TABLE 73
Exemplified Residues for GTGT Center Sequence (First Subunit)

| | | | | | | |
|---|---|---|---|---|---|---|
| I-CreI Position | 48 | 50 | 71 | 72 | 73 | 74 |
| EN Position | 48 | 50 | 71 | 72 | 73 | 74 |
| Residue(s) | K, S, | Q, V, | G, R, | R, P, | A, S, | S, A, |
| | L, V, | R, S, | N, H, | A, Q, | C, T | T |
| | G, R, | K, A, | A, T | K, T, | | |
| | N | E, C | | G, V | | |

TABLE 74
Additionally Exemplified Residues for
GTGT Center Sequence (First Subunit)

| | | | |
|---|---|---|---|
| I-CreI Position | 19 | 80 | 139 |
| EN Position | 19 | 80 | 139 |
| Residue(s) | A, S | Q, E | K, R |

TABLE 75
Exemplified Residues for TCAA Center Sequence (First Subunit)

| | | | | |
|---|---|---|---|---|
| I-CreI Position | 48 | 50 | 71 | 72 |
| EN Position | 48 | 50 | 71 | 72 |
| Residue(s) | K, S | R, T,C | G, R, T | R, S, P, |
| | | | | T, G |

TABLE 76
Additionally Exemplified Residues for
TCAA Center Sequence (First Subunit)

| | | | |
|---|---|---|---|
| I-CreI Position | 19 | 80 | 139 |
| EN Position | 19 | 80 | 139 |
| Residue(s) | A, S | Q, E | K, R |

TABLE 77
Exemplified Residues for TCAA Center
Sequence (Second Subunit)

| | | | | | |
|---|---|---|---|---|---|
| I-CreI Position | 48 | 50 | 72 | 73 | 74 |
| EN Position | 239 | 241 | 263 | 264 | 265 |
| Residue(s) | S, K | K, R, C, E | R, Q, N, S | I | S, A |

TABLE 78
Additionally Exemplified Residues for
TCAA Center Sequence (Second Subunit)

| | | | |
|---|---|---|---|
| I-CreI Position | 19 | 80 | 139 |
| EN Position | 210 | 271 | 330 |
| Residue(s) | G, S | Q, E | R |

TABLE 79
Exemplified Residues for TTAA Center Sequence (First Subunit)

| | | | | | |
|---|---|---|---|---|---|
| I-CreI Position | 48 | 50 | 71 | 72 | 74 |
| EN Position | 48 | 50 | 71 | 72 | 74 |
| Residue(s) | K, N, | R, V, | G, R, N, | R, T, S, N, | S, A |
| | S, R | K, S | S, A | D, Q, K, A | |

TABLE 80
Additionally Exemplified Residues for
TTAA Center Sequence (First Subunit)

| | | | |
|---|---|---|---|
| I-CreI Position | 19 | 80 | 139 |
| EN Position | 19 | 80 | 139 |
| Residue(s) | A, G, S | Q, E | K, R |

TABLE 81
Exemplified Residues for TTAA Center
Sequence (Second Subunit)

| | | | | | |
|---|---|---|---|---|---|
| I-CreI Position | 48 | 50 | 72 | 73 | 74 |
| EN Position | 239 | 241 | 257 | 263 | 264 |
| Residue(s) | K, S, A, T | C, K, R, | T, K, R, | I, V | S, A |
| | | T, E | A, S, Q | | |

TABLE 82
Additionally Exemplified Residues for
TTAA Center Sequence (Second Subunit)

| | | | | |
|---|---|---|---|---|
| I-CreI Position | 19 | 66 | 80 | 139 |
| EN Position | 210 | 257 | 271 | 330 |
| Residue(s) | G, A, S | Y, H | Q | R |

TABLE 83
Exemplified Residues for TTGG Center Sequence (First Subunit)

| | | | | |
|---|---|---|---|---|
| I-CreI Position | 50 | 71 | 72 | 73 |
| EN Position | 50 | 71 | 72 | 73 |
| Residue(s) | R | S | G | R |

TABLE 84
Additionally Exemplified Residues for
TTGG Center Sequence (First Subunit)

| | | |
|---|---|---|
| I-CreI Position | 19 | 80 |
| EN Position | 19 | 80 |
| Residue(s) | A, G | Q |

TABLE 85
Exemplified Residues for TTGG Center
Sequence (Second Subunit)

| | | | | | | |
|---|---|---|---|---|---|---|
| I-CreI Position | 48 | 50 | 71 | 72 | 73 | 74 |
| EN Position | 239 | 241 | 257 | 262 | 263 | 264 |
| Residue(s) | K, S | C, T, E, | G, K | T, Q, K, R, | I, V | S, A |
| | | K, R | | H, A, S | | |

TABLE 86
Additionally Exemplified Residues for
TTGG Center Sequence (Second Subunit)

| | | | | | |
|---|---|---|---|---|---|
| I-CreI Position | 19 | 66 | 80 | 85 | 139 |
| EN Position | 210 | 257 | 271 | 276 | 330 |
| Residue(s) | G, A | Y, H | Q | H, R | K, R |

TABLE 87
Exemplified Residues for GCAG Center Sequence (First Subunit)

| | | | | |
|---|---|---|---|---|
| I-CreI Position | 50 | 71 | 72 | 73 |
| EN Position | 50 | 71 | 72 | 73 |
| Residue(s) | R | S | G | R |

TABLE 88
Additionally Exemplified Residues for
GCAG Center Sequence (First Subunit)

| | | |
|---|---|---|
| I-CreI Position | 19 | 80 |
| EN Position | 19 | 80 |
| Residue(s) | A | Q |

TABLE 89
Exemplified Residues for GCAG Center
Sequence (Second Subunit)

| | | | | |
|---|---|---|---|---|
| I-CreI Position | 48 | 50 | 72 | 73 |
| EN Position | 239 | 241 | 262 | 263 |
| Residue(s) | K, H | Q, R | S, R | V, T |

TABLE 90
Additionally Exemplified Residues for
GCAG Center Sequence (Second Subunit)

| | |
|---|---|
| I-CreI Position | 80 |
| EN Position | 271 |
| Residue(s) | Q |

[1105] According to Tables 1-90 above there are certain common residues that may be substituted for residues 48, 50, 71, 72, 73, 73B, and 74 corresponding to SEQ ID NO: 1 (i.e., I-CreI) to improve the cleaving of certain center sequences. The residues indicated in tables 91-110 below represent residues that may be substituted for the corresponding wild type I-CreI residues with an expectation of an improvement in cleavage activity of the indicated center sequence based on the analysis of the exemplified residues in tables 1-90 for related center sequences. In some embodiments, the engineered meganucleases described herein that cleave a center sequence selected from ACAA, ACAG, ACAT, ACGA, ACGC, ACGG, ACGT, ATAA, ATAG, ATAT, ATGA, ATGG, GCAA, GCAT, GCGA, GCAG, TTAA, TCAA, and TTGG comprise one or more residues in a first subunit and a second subunit at positions 48, 50, 71, 72, 73, 73B, and 74 according to table 91 and table 92 below.

TABLE 91
Common Residues for ACAA, ACAG, ACAT, ACGA, ACGC, ACGG,
ACGT, ATAA, ATAG, ATAT, ATGA, ATGG, GCAA, GCAT, GCGA,
GCAG, TTAA, TCAA, and TTGG (First Subunit)

| | | | | | | | |
|---|---|---|---|---|---|---|---|
| I-CreI Position | 48 | 50 | 71 | 72 | 73 | 73B | 74 |
| EN Position | 48 | 50 | 71 | 72 | 73 | 73B | 74 |
| Residue(s) | A, C, | A, C, | A, G, | A, D, | A, C, | no R | A, C, |
| | D, G, | D, E, | H, I, | G, H, | G, I, | | T, S |
| | H, I, | G, I, | K, N, | K, L, | S, T, | | |
| | K, L, | K, L, | P, R, | M, N, | V | | |
| | N, Q, | N, Q, | S, T | P, Q, | | | |
| | R, S, | R, S, | | R, S, | | | |
| | T | T, V, | | T, V | | | |
| | | W | | | | | |

TABLE 92
Common Residues for ACAA, ACAG, ACAT, ACGA, ACGC, ACGG,
ACGT, ATAA, ATAG, ATAT, ATGA, ATGG, GCAA, GCAT, GCGA,
GCAG, TTAA, TCAA, and TTGG (Second Subunit)

| | | | | | | | |
|---|---|---|---|---|---|---|---|
| I-CreI Position | 48 | 50 | 71 | 72 | 73 | 73B | 74 |
| EN Position | 239 | 241 | 262 | 263 | 264 | 264B | 265 |
| Residue(s) | A, C, | A, C, | A, D, | A, C, | A, C, | R or | A, C, |
| | G, H, | E, G, | E, G, | E, G, | G, H, | no R | S, T |
| | I, K, | H, I, | H, I, | H, I, | I, R, | | |
| | L, N, | K, N, | K, N, | K, M, | S, T, | | |
| | Q, R, | P, Q, | P, Q, | N, P, | V | | |
| | S, T | R, S, | R, S, | Q, R, | | | |
| | | T, V | T, Y | S, T, | | | |
| | | | | V, Y | | | |

[1106] It was further discovered that particular identical residues in the first subunit for the same two base pairs of a center sequence of a second center sequence have similar residues that may be suitably substituted at one or more positions corresponding to positions 48, 50, 71, 72, 73, 73B, and 74 of I-CreI. For example, a first subunit for meganucleases cleaving the center sequences ACAA and ACAG having the first two base pairs AC are substituted in a more similar way. Accordingly, particular residues may be substituted for positions corresponding to positions 48, 50, 71, 72, 73, and 74 of I-CreI to improve cleavage activity of the center sequences ACAA, ACAG, ACAT, ACGA, ACGC, ACGG, and ACGT. In some embodiments described herein are engineered meganucleases having one or more substitutions in positions corresponding to positions 48, 50, 71, 72, 73, 73B, and 74 of SEQ ID NO: 1 (i.e., I-CreI) in a first subunit and a second subunit according to table and table 94 below.

TABLE 93
Common Residues for ACAA, ACAG, ACAT, ACGA,
ACGC, ACGG, and ACGT (First Subunit)

| | | | | | | | |
|---|---|---|---|---|---|---|---|
| I-CreI Position | 48 | 50 | 71 | 72 | 73 | 73B | 74 |
| EN Position | 48 | 50 | 71 | 72 | 73 | 73B | 74 |
| Residue(s) | A, C, | A, C, | A, G, | H, K, | A, C, | no R | S |
| | G, H, | K, Q, | P, R | P, Q, | G, V | | |
| | I, K, | R, S, | | R, T, | | | |
| | L, N, | T, V, | | | | | |
| | Q, S | W | | | | | |

TABLE 94
Common Residues for ACAA, ACAG, ACAT, ACGA,
ACGC, ACGG, and ACGT (Second Subunit)

| | | | | | | | |
|---|---|---|---|---|---|---|---|
| I-CreI Position | 48 | 50 | 71 | 72 | 73 | 73B | 74 |
| EN Position | 239 | 241 | 262 | 263 | 264 | 264B | 265 |
| Residue(s) | A, C, | A, C, | A, D, | A, G, | A, C, | R or | A, C, |
| | G, H, | E, G, | E, G, | H, K, | G, H, | no R | S, T |
| | K, L, | I, K, | H, K, | M, N, | I, R, | | |
| | N, Q, | N, P, | N, P, | P, P, | S, T, | | |
| | R, S, | Q, R, | R, S, | Q, R, | V | | |
| | T | S, T, | T | S, T | | | |
| | | V | | | | | |

[1107] In some further embodiments, one or more residues may be substituted for positions corresponding to positions 48, 50, 71, 72, 73, 73B, and 74 of SEQ ID NO: 1 (i.e., I-CreI) to improve cleavage activity of the center sequences ATAA, ATAG, ATAT, ATGA, and ATGG as shown in table 95 and 96 below.

TABLE 95
Common Residues for ATAA, ATAG, ATAT,
ATGA, and ATGG (First Subunit)

| | | | | | | | |
|---|---|---|---|---|---|---|---|
| I-CreI Position | 48 | 50 | 71 | 72 | 73 | 73B | 74 |
| EN Position | 48 | 50 | 71 | 72 | 73 | 73B | 74 |
| Residue(s) | A, C, | C, D, | G, H, | A, G, | A, C, | no R | A, C, |
| | D, G, | E, G, | I, K, | H, K, | S, T | | S |
| | H, K, | I, K, | N, R, | L, N, | | | |
| | L, N, | N, R, | S | P, Q, | | | |
| | Q, S, | S, T, | | R, S, | | | |
| | T | V | | T | | | |

TABLE 96
Common Residues for ATAA, ATAG, ATAT,
ATGA, and ATGG (Second Subunit)

| | | | | | | | |
|---|---|---|---|---|---|---|---|
| I-CreI Position | 48 | 50 | 71 | 72 | 73 | 73B | 74 |
| EN Position | 239 | 241 | 262 | 263 | 264 | 264B | 265 |
| Residue(s) | A, C, | A, C, | D, E, | A, G, | A, C, | R or | A, C, |
| | G, H, | E, I, | G, H, | H, K, | G, H, | no R | S, T |
| | K, N, | K, N, | I, K, | N, Q, | I, R, | | |
| | Q, R, | Q, R, | R, S, | R, S, | S, V | | |
| | S, T | S, T | T | T, V, | | | |
| | | | | Y | | | |

[1108] In some other embodiments, one or more residues may be substituted for positions corresponding to positions 48, 50, 71, 72, 73, 73B, and 74 of SEQ ID NO: 1 (i.e., I-CreI) to improve cleavage activity of the center sequences GCAA, GCAT, GCGA, and GCAG as shown in table 97 and table 98 below.

TABLE 97
Common Residues for GCAA, GCAT,
GCGA, and GCAG (First Subunit)

| | | | | | | | |
|---|---|---|---|---|---|---|---|
| I-CreI Position | 48 | 50 | 71 | 72 | 73 | 73B | 74 |
| EN Position | 48 | 50 | 71 | 72 | 73 | 73B | 74 |
| Residue(s) | A, H, | C, K, | A, G, | A, G, | A, C, | no R | A, S |
| | K, R | L, Q, | H, N, | H, M, | I, T, | | |
| | | R, S, | R, S, | N, P, | V | | |
| | | T, V | T | Q, R, | | | |
| | | | | S, T, | | | |
| | | | | V | | | |

TABLE 98
Common Residues for GCAA, GCAT,
GCGA, and GCAG (Second Subunit)

| | | | | | | | |
|---|---|---|---|---|---|---|---|
| I-CreI Position | 48 | 50 | 71 | 72 | 73 | 73B | 74 |
| EN Position | 239 | 241 | 262 | 263 | 264 | 264B | 265 |
| Residue(s) | A, C, | C, E, | A, G, | A, C, | A, C, | no R | A, S, |
| | G, H, | H, K, | H, K, | E, G, | G, H, | | T |
| | I, K, | Q, R, | R, S, | H, K, | I, R, | | |
| | L, N, | S, T, | T, Y | N, Q, | S, V | | |
| | Q, R, | V | | R, S, | | | |
| | S, T | | | T, Y | | | |

[1109] In some particular embodiments, one or more residues may be substituted for positions corresponding to positions 48, 50, 71, 72, 73, 73B, and 74 of SEQ ID NO: 1 (i.e., I-CreI) to improve cleavage activity of the center sequences TTAA and TTGG as shown in table 99 and table 100 below.

TABLE 99
Common Residues for TTAA and TTGG (First Subunit)

| | | | | | | | |
|---|---|---|---|---|---|---|---|
| I-CreI Position | 48 | 50 | 71 | 72 | 73 | 73B | 74 |
| EN Position | 48 | 50 | 71 | 72 | 73 | 73B | 74 |
| Residue(s) | K, N, | C, E, | A, G, | A, D, | I, V | no R | A, S, |
| | R, S | K, R, | K, N, | H, K, | | | T |
| | | S, T, | R, S | N, Q, | | | |
| | | V | | R, S, | | | |
| | | | | T | | | |

TABLE 100
Common Residues for TTAA and TTGG (Second Subunit)

| | | | | | | | |
|---|---|---|---|---|---|---|---|
| I-CreI Position | 48 | 50 | 71 | 72 | 73 | 73B | 74 |
| EN Position | 239 | 241 | 262 | 263 | 264 | 264B | 265 |
| Residue(s) | A, K, | C, E, | A, D, | G, I, | I, R, | R or | A, S, |
| | S, T | K, R, | G, K, | R, S, | V | no R | T |
| | | T | Q, R, | T, V | | | |
| | | | S, T | | | | |

[1110] In some other embodiments, one or more residues may be substituted for positions corresponding to positions 48, 50, 71, 72, 73, 73B, and 74 of SEQ ID NO: 1 (i.e., I-CreI) to improve cleavage activity of the center sequence TCAA as shown in table 101 and table 102 below.

TABLE 101
Common Residues for TCAA (First Subunit)

| | | | | | | | |
|---|---|---|---|---|---|---|---|
| I-CreI Position | 48 | 50 | 71 | 72 | 73 | 73B | 74 |
| EN Position | 48 | 50 | 71 | 72 | 73 | 73B | 74 |
| Residue(s) | A, G, | C, R, | G, R, | G, H, | I, V | No R | A, S |
| | H, K, | S, T | S, T | P, R, | | | |
| | N, Q, | | | S, T | | | |
| | R, S | | | | | | |

TABLE 102
Common Residues for TCAA (Second Subunit)

| | | | | | | | |
|---|---|---|---|---|---|---|---|
| I-CreI Position | 48 | 50 | 71 | 72 | 73 | 73B | 74 |
| EN Position | 239 | 241 | 262 | 263 | 264 | 264B | 265 |
| Residue(s) | K, S | C, K, | G, R, | G, P, | I, V | No R | A, S, |
| | | R, T | T | R, S, | | | T |
| | | | | T | | | |

[1111] It was likewise identified that particular identical residues in the second subunit for the same two base pairs of a center sequence of a second center sequence have similar residues that may be suitably substituted at positions corresponding to positions 48, 50, 71, 72, 73, 73B, and 74 of SEQ ID NO: 1 (i.e., I-CreI). For example, a second subunit for meganucleases cleaving the center sequences ACAA and ATAA both having the second two base pairs AA (reverse complement TT) are substituted in a similar way. Accordingly, in some embodiments, one or more residues may be substituted for positions corresponding to positions 48, 50, 71, 72, 73, 73B, and 74 of SEQ ID NO: 1 (i.e., I-CreI) to improve cleavage activity of the center sequences ACAA, ATAA, GCAA, TTAA, and TCAA as shown in table 103 below.

TABLE 103
Additional Common Residues for ACAA, ATAA,
GCAA, TTAA, TCAA (Second Subunit)

| | | | | | | | |
|---|---|---|---|---|---|---|---|
| I-CreI Position | 48 | 50 | 71 | 72 | 73 | 73B | 74 |
| EN Position | 239 | 241 | 262 | 263 | 264 | 264B | 265 |
| Residue(s) | A, K, | A, C, | A, G, | A, C, | C, H, | — | A, S, |
| | N, S, | E, K, | H, K, | E, G, | I, V | | T |
| | T | K, R, | Q, R, | H, K, | | | |
| | | T | S, T | N, P, | | | |
| | | | | Q, R, | | | |
| | | | | S, T, | | | |
| | | | | Y | | | |

[1112] In some further embodiments, one or more residues may be substituted for positions corresponding to positions 48, 50, 71, 72, 73, 73B, and 74 of SEQ ID NO: 1 (i.e., I-CreI) to improve cleavage activity of the center sequences ACAG, ATAG, and GCAG as shown in table 104 below.

TABLE 104
Additional Common Residues for ACAG,
ATAG, and GCAG (Second Subunit)

| | | | | | | | |
|---|---|---|---|---|---|---|---|
| I-CreI Position | 48 | 50 | 71 | 72 | 73 | 73B | 74 |
| EN Position | 239 | 241 | 262 | 263 | 264 | 264B | 265 |
| Residue(s) | K | C, R | D, G, S | G, N, R, | R | — | S |
| | | | | or S | | | |

[1113] In some further embodiments, one or more residues may be substituted for positions corresponding to positions 48, 50, 71, 72, 73, 73B, and 74 of SEQ ID NO: 1 (i.e., I-CreI) to improve cleavage activity of the center sequences ACAT, ATAT, and GCAT as shown in table 105 below.

TABLE 105
Additional Common Residues for ACAT,
ATAT, and GCAT (Second Subunit)

| | | | | | | | |
|---|---|---|---|---|---|---|---|
| I-CreI Position | 48 | 50 | 71 | 72 | 73 | 73B | 74 |
| EN Position | 239 | 241 | 262 | 263 | 264 | 264B | 265 |
| Residue(s) | A, C, | C, G, | A, E, | A, G, | A, C, | — | A, C, |
| | G, H, | H, K, | G, H, | H, K, | G, H, | | S |
| | I, K, | N, Q, | I, K, | N, Q, | R, S | | |
| | L, N, | R, S, | R, S, | R, S, | | | |
| | Q, R, | V | T, Y | T | | | |
| | S, T | | | | | | |

[1114] In some alternative embodiments, one or more residues may be substituted for positions corresponding to positions 48, 50, 71, 72, 73, 73B, and 74 of SEQ ID NO: 1 (i.e., I-CreI) to improve cleavage activity of the center sequences ACGA, ATGA, and GCGA as shown in table 106 below.

TABLE 106
Additional Common Residues for ACGA,
ATGA, and GCGA (Second Subunit)

| | | | | | | | |
|---|---|---|---|---|---|---|---|
| I-CreI Position | 48 | 50 | 71 | 72 | 73 | 73B | 74 |
| EN Position | 239 | 241 | 262 | 263 | 264 | 264B | 265 |
| Residue(s) | A, G, | A, C, | G, H, | H, I, | I, V | | A, S, |
| | H, K, | G, I, | R, S, | R, S, | | | T |
| | N, Q, | Q, R, | T | T, V | | | |
| | R, S, | S, V | | | | | |
| | T | | | | | | |

[1115] In some alternative embodiments, one or more residues may be substituted for positions corresponding to positions 48, 50, 71, 72, 73, 73B, and 74 of SEQ ID NO: 1 (i.e., I-CreI) to improve cleavage activity of the center sequences ACGA, ATGA, and GCGA as shown in table 107 below.

TABLE 107
Additional Common Residues for ACGC (Second Subunit)

| | | | | | | | |
|---|---|---|---|---|---|---|---|
| I-CreI Position | 48 | 50 | 71 | 72 | 73 | 73B | 74 |
| EN Position | 239 | 241 | 262 | 263 | 264 | 264B | 265 |
| Residue(s) | A, H, | E, I, | A, G, | A, G, | C, H, | | S |
| | K, L, | K, | H, K, | H, M, | I, T, | | |
| | N, S | N, R, | N, R, | N, P, | V | | |
| | | S, V | S, T | Q, R, | | | |
| | | | | S, T | | | |

[1116] In some other embodiments, one or more residues may be substituted for positions corresponding to positions 48, 50, 71, 72, 73, 73B, and 74 of SEQ ID NO: 1 (i.e., I-CreI) to improve cleavage activity of the center sequences ACGA, ATGA, and GCGA as shown in table 108 below.

TABLE 108
Additional Common Residues for ACGG,
ATGG, and TTGG (Second Subunit)

| | | | | | | | |
|---|---|---|---|---|---|---|---|
| I-CreI Position | 48 | 50 | 71 | 72 | 73 | 73B | 74 |
| EN Position | 239 | 241 | 262 | 263 | 264 | 264B | 265 |
| Residue(s) | K | P, R | G, D, | G | G, R | R or | A, S, |
| | | | S | | | no R | T |

[1117] In some embodiments, one or more residues may be substituted for positions corresponding to positions 48, 50, 71, 72, 73, 73B, and 74 of SEQ ID NO: 1 (i.e., I-CreI) to improve cleavage activity of the center sequences ACGT as shown in table 109 below.

TABLE 109
Additional Common Residues for ACGT (Second Subunit)

| | | | | | | | |
|---|---|---|---|---|---|---|---|
| I-CreI Position | 48 | 50 | 71 | 72 | 73 | 73B | 74 |
| EN Position | 239 | 241 | 262 | 263 | 264 | 264B | 265 |
| Residue(s) | A, C, | A, C, | A, G, | A, K, | A, C, | | S |
| | G, H, | E, K, | N, P, | R, T | H, S | | |
| | K, L, | Q, R, | R, S, | | | | |
| | N, Q, | S | or T | | | | |
| | S | | | | | | |

[1118] In some embodiments, the engineered meganucleases described herein that cleave a center sequence selected from GTAA, GTAG, GTAT, GTGA, GTGC, GTGG, and GTGT comprise one or more residues in a first subunit at positions 48, 50, 71, 72, 73, 73B, and 74 according to table 110 below. The GT (reverse complement AC) binding subunit for these meganucleases was not altered since the wild type SEQ ID NO: 1 (i.e., I-CreI) center sequence is GTGA.

TABLE 110
Common Residues for GTAA, GTAG,
GTAT, GTGA, GTGC, GTGG, and GTGT

| | | | | | | | |
|---|---|---|---|---|---|---|---|
| I-CreI Position | 48 | 50 | 71 | 72 | 73 | 73B | 74 |
| EN Position | 239 | 241 | 262 | 263 | 264 | 264B | 265 |
| Residue(s) | A, C, | A, C, | A, D, | A, C, | A, C, | — | A, C, |
| | G, H, | E, G, | E, F, | D, G, | I, L, | | G, S, |
| | K, L, | I, K, | G, H, | H, K, | N, R, | | T |
| | M, N, | L, Q, | I, K, | M, N, | S, T, | | |
| | Q, R, | R, S, | L, N, | P, Q, | V | | |
| | S, T, | T, V | Q, R, | R, S, | | | |
| | V | | S, T, | T, V, | | | |
| | | | V, Y | w, Y | | | |

[1119] In some embodiments described herein is an engineered meganuclease that cleaves the center sequence ATAT, wherein the engineered meganuclease comprises a substitution described herein in a first subunit at positions corresponding to positions 50, 72, and 73 of SEQ ID NO: 1 (i.e., I-CreI). In some embodiments described herein is an engineered meganuclease that cleaves the center sequence ATAT, wherein the engineered meganuclease comprises a substitution described herein in a second subunit at positions corresponding to positions 48, 50, 71, 72, 73, and 74 of SEQ ID NO: 1 (i.e., I-CreI).

[1120] In some embodiments described herein is an engineered meganuclease that cleaves the center sequence ATAA, wherein the engineered meganuclease comprises a substitution described herein in a first subunit at positions corresponding to positions 50, 72, and 73 of SEQ ID NO: 1 (i.e., I-CreI). In some embodiments described herein is an engineered meganuclease that cleaves the center sequence ATAA, wherein the engineered meganuclease comprises a substitution described herein in a second subunit at positions corresponding to positions 50 of SEQ ID NO: 1 (i.e., I-CreI).

[1121] In some embodiments described herein is an engineered meganuclease that cleaves the center sequence ATAG, wherein the engineered meganuclease comprises a substitution described herein in a first subunit at positions corresponding to positions 50, 72, and 73 of SEQ ID NO: 1 (i.e., I-CreI). In some embodiments described herein is an engineered meganuclease that cleaves the center sequence ATAG, wherein the engineered meganuclease comprises a substitution described herein in a second subunit at positions corresponding to positions 50, 72, and 73 of SEQ ID NO: 1 (i.e., I-CreI).

[1122] In some embodiments described herein is an engineered meganuclease that cleaves the center sequence ATGA, wherein the engineered meganuclease comprises a substitution described herein in a first subunit at positions corresponding to positions 50, 72, and 73 of SEQ ID NO: 1 (i.e., I-CreI). In some embodiments described herein is an engineered meganuclease that cleaves the center sequence ATGA, wherein the engineered meganuclease comprises a substitution described herein in a second subunit at positions corresponding to positions 50 and 72 of SEQ ID NO: 1 (i.e., I-CreI).

[1123] In some embodiments described herein is an engineered meganuclease that cleaves the center sequence ATGG, wherein the engineered meganuclease comprises a substitution described herein in a first subunit at positions corresponding to positions 50, 72, and 73 of SEQ ID NO: 1 (i.e., I-CreI). In some embodiments described herein is an engineered meganuclease that cleaves the center sequence ATGG, wherein the engineered meganuclease comprises a substitution described herein in a second subunit at positions corresponding to positions 50, 71, 72, 73, 73B of SEQ ID NO: 1 (i.e., I-CreI).

[1124] In some embodiments described herein is an engineered meganuclease that cleaves the center sequence ACAA, wherein the engineered meganuclease comprises a substitution described herein in a first subunit at positions corresponding to positions 50, 72, and 73 of SEQ ID NO: 1 (i.e., I-CreI). In some embodiments described herein is an engineered meganuclease that cleaves the center sequence ACAA, wherein the engineered meganuclease comprises a substitution described herein in a second subunit at positions corresponding to positions 50 of SEQ ID NO: 1 (i.e., I-CreI).

[1125] In some embodiments described herein is an engineered meganuclease that cleaves the center sequence ACAG, wherein the engineered meganuclease comprises a substitution described herein in a first subunit at positions corresponding to positions 50, 72, and 73 of SEQ ID NO: 1 (i.e., I-CreI). In some embodiments described herein is an engineered meganuclease that cleaves the center sequence ACAG, wherein the engineered meganuclease comprises a substitution described herein in a second subunit at positions corresponding to positions 50, 72, and 73 of SEQ ID NO: 1 (i.e., I-CreI).

[1126] In some embodiments described herein is an engineered meganuclease that cleaves the center sequence ACAT, wherein the engineered meganuclease comprises a substitution described herein in a first subunit at positions corresponding to positions 50, 72, and 73 of SEQ ID NO: 1 (i.e., I-CreI). In some embodiments described herein is an engineered meganuclease that cleaves the center sequence ACAT, wherein the engineered meganuclease comprises a substitution described herein in a second subunit at positions corresponding to positions 48, 50, and 73 of SEQ ID NO: 1 (i.e., I-CreI).

[1127] In some embodiments described herein is an engineered meganuclease that cleaves the center sequence ACGA, wherein the engineered meganuclease comprises a substitution described herein in a first subunit at positions corresponding to positions 50, 72, and 73 of SEQ ID NO: 1 (i.e., I-CreI). In some embodiments described herein is an engineered meganuclease that cleaves the center sequence ACGA, wherein the engineered meganuclease comprises a substitution described herein in a second subunit at positions corresponding to positions 50 and 72 of SEQ ID NO: 1 (i.e., I-CreI).

[1128] In some embodiments described herein is an engineered meganuclease that cleaves the center sequence ACGC, wherein the engineered meganuclease comprises a substitution described herein in a first subunit at positions corresponding to positions 50, 72, and 73 of SEQ ID NO: 1 (i.e., I-CreI). In some embodiments described herein is an engineered meganuclease that cleaves the center sequence ACGC, wherein the engineered meganuclease comprises a substitution described herein in a second subunit at positions corresponding to positions 50, 72, and 73 of SEQ ID NO: 1 (i.e., I-CreI).

[1129] In some embodiments described herein is an engineered meganuclease that cleaves the center sequence ACGG, wherein the engineered meganuclease comprises a substitution described herein in a first subunit at positions corresponding to positions 50, 72, and 73 of SEQ ID NO: 1 (i.e., I-CreI). In some embodiments described herein is an engineered meganuclease that cleaves the center sequence ACGG, wherein the engineered meganuclease comprises a substitution described herein in a second subunit at positions corresponding to positions 50, 71, 72, 73, and 73B of SEQ ID NO: 1 (i.e., I-CreI).

[1130] In some embodiments described herein is an engineered meganuclease that cleaves the center sequence ACGT, wherein the engineered meganuclease comprises a substitution described herein in a first subunit at positions corresponding to positions 50, 72, and 73 of SEQ ID NO: 1 (i.e., I-CreI). In some embodiments described herein is an engineered meganuclease that cleaves the center sequence ACGT, wherein the engineered meganuclease comprises a substitution described herein in a second subunit at positions corresponding to positions 50, 71, 72, and 73 of SEQ ID NO: 1 (i.e., I-CreI).

[1131] In some embodiments described herein is an engineered meganuclease that cleaves the center sequence GCAA, wherein the engineered meganuclease comprises a substitution described herein in a first subunit at positions corresponding to positions 50 of SEQ ID NO: 1 (i.e., I-CreI). In some embodiments described herein is an engineered meganuclease that cleaves the center sequence GCAA, wherein the engineered meganuclease comprises a substitution described herein in a second subunit at positions corresponding to positions 50 of SEQ ID NO: 1 (i.e., I-CreI).

[1132] In some embodiments described herein is an engineered meganuclease that cleaves the center sequence GCAT, wherein the engineered meganuclease comprises a substitution described herein in a first subunit at positions corresponding to positions 50 of SEQ ID NO: 1 (i.e., I-CreI). In some embodiments described herein is an engineered meganuclease that cleaves the center sequence GCAT, wherein the engineered meganuclease comprises a substitution described herein in a second subunit at positions corresponding to positions 48, 50, 72, and 73 of SEQ ID NO: 1 (i.e., I-CreI).

[1133] In some embodiments described herein is an engineered meganuclease that cleaves the center sequence GCGA, wherein the engineered meganuclease comprises a substitution described herein in a first subunit at positions corresponding to positions 50 of SEQ ID NO: 1 (i.e., I-CreI). In some embodiments described herein is an engineered meganuclease that cleaves the center sequence GCGA, wherein the engineered meganuclease comprises a substitution described herein in a second subunit at positions corresponding to positions 48, 50, 72, and 73 of SEQ ID NO: 1 (i.e., I-CreI).

[1134] In some embodiments described herein is an engineered meganuclease that cleaves the center sequence GCAG, wherein the engineered meganuclease comprises a substitution described herein in a first subunit at positions corresponding to positions 50 of SEQ ID NO: 1 (i.e., I-CreI). In some embodiments described herein is an engineered meganuclease that cleaves the center sequence GCAG, wherein the engineered meganuclease comprises a substitution described herein in a second subunit at positions corresponding to positions 50, 71, 72, and 73 of SEQ ID NO: 1 (i.e., I-CreI).

[1135] In some embodiments described herein is an engineered meganuclease that cleaves the center sequence TTAA, wherein the engineered meganuclease comprises a substitution described herein in a first subunit at positions corresponding to positions 50 of SEQ ID NO: 1 (i.e., I-CreI). In some embodiments described herein is an engineered meganuclease that cleaves the center sequence TTAA, wherein the engineered meganuclease comprises a substitution described herein in a second subunit at positions corresponding to positions 50 of SEQ ID NO: 1 (i.e., I-CreI).

[1136] In some embodiments described herein is an engineered meganuclease that cleaves the center sequence TTGG, wherein the engineered meganuclease comprises a substitution described herein in a first subunit at positions corresponding to positions 50, 72, and 73 of SEQ ID NO: 1 (i.e., I-CreI). In some embodiments described herein is an engineered meganuclease that cleaves the center sequence TTGG, wherein the engineered meganuclease comprises a substitution described herein in a second subunit at positions corresponding to positions 50, 71, 72, and 73 of SEQ ID NO: 1 (i.e., I-CreI).

[1137] In some embodiments described herein is an engineered meganuclease that cleaves the center sequence TCAA, wherein the engineered meganuclease comprises a substitution described herein in a first subunit at positions corresponding to positions 50 of SEQ ID NO: 1 (i.e., I-CreI). In some embodiments described herein is an engineered meganuclease that cleaves the center sequence TCAA, wherein the engineered meganuclease comprises a substitution described herein in a second subunit at positions corresponding to positions 50, 72, 73, and 74 of SEQ ID NO: 1 (i.e., I-CreI).

[1138] In some embodiments described herein is an engineered meganuclease that cleaves the center sequence GTAT, wherein the engineered meganuclease comprises a substitution described herein in a first subunit at positions corresponding to positions 50, 72, and 73 of SEQ ID NO: 1 (i.e., I-CreI).

[1139] In some embodiments described herein is an engineered meganuclease that cleaves the center sequence GTGG, wherein the engineered meganuclease comprises a substitution described herein in a first subunit at positions corresponding to positions 50, 71, 72, and 73 of SEQ ID NO: 1 (i.e., I-CreI).

[1140] In some embodiments described herein is an engineered meganuclease that cleaves the center sequence GTGC, wherein the engineered meganuclease comprises a substitution described herein in a first subunit at positions corresponding to positions 50 of SEQ ID NO: 1 (i.e., I-CreI).

[1141] In some embodiments described herein is an engineered meganuclease that cleaves the center sequence GTAG, wherein the engineered meganuclease comprises a substitution described herein in a first subunit at positions corresponding to positions 50, 71, 72, and 73 of SEQ ID NO: 1 (i.e., I-CreI).

[1142] In some embodiments described herein is an engineered meganuclease that cleaves the center sequence GTGA, wherein the engineered meganuclease comprises a substitution described herein in a first subunit at positions corresponding to positions 48 and 50 of SEQ ID NO: 1 (i.e., I-CreI).

[1143] In some embodiments described herein is an engineered meganuclease that cleaves the center sequence GTAA, wherein the engineered meganuclease comprises a substitution described herein in a first subunit at positions corresponding to positions 50 of SEQ ID NO: 1 (i.e., I-CreI).

[1144] In some embodiments described herein is an engineered meganuclease that cleaves the center sequence GTGT, wherein the engineered meganuclease comprises a substitution described herein in a first subunit at positions corresponding to positions 50, 72, and 73 of SEQ ID NO: 1 (i.e., I-CreI).

[1145] In addition, it was discovered that certain positions corresponding to positions 48, 50, 71, 72, 73, and 74 are more commonly substituted for particular center sequences. In some embodiments described herein is an engineered meganuclease that cleaves a center sequence comprising ACAA, ACAG, ACAT, ACGA, ACGC, ACGG, ACGT, ATAA, ATAG, ATAT, ATGA, or ATGG, wherein the engineered meganuclease comprises a substitution described herein in a first subunit at positions corresponding to positions 50, 72, and 73 of SEQ ID NO: 1 (i.e., I-CreI) as described herein.

[1146] In some embodiments described herein is an engineered meganuclease that cleaves a center sequence comprising ATAA, ATAG, ATAT, ATGA, or ATGG, wherein the engineered meganuclease comprises a substitution described herein in a first subunit at positions corresponding to positions 50, 72, and 73 of SEQ ID NO: 1 (i.e., I-CreI) as described herein.

[1147] In some embodiments described herein is an engineered meganuclease that cleaves a center sequence comprising GCAA, GCAT, GCGA, or GCAG, wherein the engineered meganuclease comprises a substitution described herein in a first subunit at positions corresponding to position 50 of SEQ ID NO: 1 (i.e., I-CreI) as described herein. In some embodiments described herein is an engineered meganuclease that cleaves a center sequence comprising GCAA, GCAT, GCGA, or GCAG, wherein the engineered meganuclease comprises a substitution described herein in a first subunit at positions corresponding to positions 50, 72, and 73 of SEQ ID NO: 1 (i.e., I-CreI) as described herein.

[1148] In some embodiments described herein is an engineered meganuclease that cleaves a center sequence comprising TTAA and TTGG, wherein the engineered meganuclease comprises a substitution described herein at a position corresponding to position 50 of SEQ ID NO: 1 (i.e., I-CreI) as described herein. In some embodiments described herein is an engineered meganuclease that cleaves a center sequence comprising TCAA, wherein the engineered meganuclease comprises a substitution described herein at a position corresponding to position 50 of SEQ ID NO: 1 (i.e., I-CreI) as described herein.

[1149] In some embodiments described herein is an engineered meganuclease that cleaves a center sequence comprising ACAA, ATAA, TTAA, or TCAA, wherein the engineered meganuclease comprises a substitution described herein in a second subunit at positions corresponding to positions 50, 72, and 73 of SEQ ID NO: 1 (i.e., I-CreI) as described herein.

[1150] In some embodiments described herein is an engineered meganuclease that cleaves a center sequence comprising ACAA, ATAA, TTAA, or TCAA, wherein the engineered meganuclease comprises a substitution described herein in a second subunit at positions corresponding to positions 50 of SEQ ID NO: 1 (i.e., I-CreI) as described herein.

[1151] In some embodiments described herein is an engineered meganuclease that cleaves a center sequence comprising ACAG, ATAG, or GCAG, wherein the engineered meganuclease comprises a substitution described herein in a second subunit at positions corresponding to positions 50, 72, and 73 of SEQ ID NO: 1 (i.e., I-CreI) as described herein. In some embodiments described herein is an engineered meganuclease that cleaves a center sequence comprising ACAG, ATAG, or GCAG, wherein the engineered meganuclease comprises a substitution described herein in a second subunit at positions corresponding to positions 50, 71, 72, and 73 of SEQ ID NO: 1 (i.e., I-CreI) as described herein.

[1152] In some embodiments described herein is an engineered meganuclease that cleaves a center sequence comprising ACAT, ATAT, or GCAT, wherein the engineered meganuclease comprises a substitution described herein in a second subunit at positions corresponding to positions 50, 72, and 73 of SEQ ID NO: 1 (i.e., I-CreI) as described herein. In some embodiments described herein is an engineered meganuclease that cleaves a center sequence comprising ACAT, ATAT, or GCAT wherein the engineered meganuclease comprises a substitution described herein in a second subunit at positions corresponding to positions 48, 50, 71, 72, 73, and 74 of SEQ ID NO: 1 (i.e., I-CreI) as described herein. In some embodiments described herein is an engineered meganuclease that cleaves a center sequence comprising ACAT, ATAT, or GCAT wherein the engineered meganuclease comprises a substitution described herein in a second subunit at positions corresponding to positions 48, 50, 72, and 73. of SEQ ID NO: 1 (i.e., I-CreI) as described herein.

[1153] In some embodiments described herein is an engineered meganuclease that cleaves a center sequence comprising ACGA, ATGA, or GCGA wherein the engineered meganuclease comprises a substitution described herein in a second subunit at positions corresponding to positions 50 and 72 of SEQ ID NO: 1 (i.e., I-CreI) as described herein. In some embodiments described herein is an engineered meganuclease that cleaves a center sequence comprising ACGA, ATGA, or GCGA wherein the engineered meganuclease comprises a substitution described herein in a second subunit at positions corresponding to positions 48, 50, 72, and 73 of SEQ ID NO: 1 (i.e., I-CreI) as described herein.

[1154] In some embodiments described herein is an engineered meganuclease that cleaves a center sequence comprising ACGG, ATGG, or TTGG wherein the engineered meganuclease comprises a substitution described herein in a second subunit at positions corresponding to positions 50, 71, 72, 73, and 73B of SEQ ID NO: 1 (i.e., I-CreI) as described herein. In some embodiments described herein is an engineered meganuclease that cleaves a center sequence comprising ACGG, ATGG, or TTGG wherein the engineered meganuclease comprises a substitution described herein in a second subunit at positions corresponding to positions 50, 71, 72, and 73 of SEQ ID NO: 1 (i.e., I-CreI) as described herein.

[1155] Although the tables above describe residues and substitutions that have been exemplified, the residues of an I-CreI-derived meganuclease can be substituted with additional amino acids to result in an increase in activity for a recognition sequence comprising a specific center sequence. In some embodiments, the modification at a given position is a conservative substitution, such as exchanging one amino acid with another having similar properties. For example, charged amino acids can be substituted with similarly charged amino acids; polar amino acids can be substituted with similarly polar amino acids; amphipathic amino acids can be substituted with similarly amphipathic amino acids; hydrophilic amino acids can be substituted with similarly hydrophilic amino acids; and hydrophobic amino acids can be substituted with similarly hydrophobic amino acids. In addition, the exemplified residues further includes amino acid analogs and non-naturally occurring amino acids, which have similar properties to the exemplified amino acids.

### 2.3 Engineered Meganuclease Variants

[1156] Embodiments of the invention encompass the engineered meganucleases described herein, and variants thereof. Further embodiments of the invention encompass isolated polynucleotides comprising a nucleic acid sequence encoding the meganucleases described herein, and variants of such polynucleotides.

[1157] Variant polypeptides encompassed by the embodiments are biologically active. That is, they continue to possess the desired biological activity of the native protein; for example, the ability to bind and cleave recognition sequences the recognition sequence, which includes the center sequences described herein, for which they were designed.

[1158] Such variants may result, for example, from human manipulation. Biologically active variants of a native polypeptide of the embodiments, or biologically active variants of the recognition half-site binding subunits described herein, will have at least about 40%, about 45%, about 50%, about 55%, about 60%, about 65%, about 70%, about 75%, about 80%, about 85%, about 90%, about 91%, about 92%, about 93%, about 94%, about 95%, about 96%, about 97%, about 98%, or about 99%, sequence identity to the amino acid sequence of the native I-CreI derived polypeptide, or native I-CreI derived subunit, as determined by sequence alignment programs and parameters described elsewhere herein. In some instances, sequence identity can be determined using all positions or, alternatively, only positions other than those described herein that contribute to activity of the engineered meganuclease for a specific center sequence. A biologically active variant of a polypeptide or subunit of the embodiments may differ from that polypeptide or subunit by as few as about 1-40 amino acid residues, as few as about 1-20, as few as about 1-10, as few as about 5, as few as 4, 3, 2, or even 1 amino acid residue.

[1159] The polypeptides of the embodiments may be altered in various ways including amino acid substitutions, deletions, truncations, and insertions. Methods for such manipulations are generally known in the art. For example, amino acid sequence variants can be prepared by mutations in the DNA. Methods for mutagenesis and polynucleotide alterations are well known in the art. See, for example, Kunkel (1985) Proc. Natl. Acad. Sci. USA 82:488-492; Kunkel et al. (1987) Methods in Enzymol. 154:367-382; U.S. Pat. No. 4,873,192; Walker and Gaastra, eds. (1983) Techniques in Molecular Biology (MacMillan Publishing Company, New York) and the references cited therein. Guidance as to appropriate amino acid substitutions that do not affect biological activity of the protein of interest may be found in the model of Dayhoff et al. (1978) Atlas of Protein Sequence and Structure (Natl. Biomed. Res. Found., Washington, D.C.), herein incorporated by reference. Conservative substitutions, such as exchanging one amino acid with another having similar properties, may be optimal.

[1160] In some embodiments, engineered meganucleases of the invention can comprise variants of the HVR1 and HVR2 regions disclosed herein. Parental HVR regions can comprise, for example, residues 24-79 or residues 215-270 of the exemplified engineered meganucleases. Thus, variant HVRs can comprise an amino acid sequence having at least 80%, at least 85%, at least 90%, at least 91%, at least 92%, at least 93%, at least 94%, at least 95%, at least 96%, at least 97%, at least 98%, at least 99%, or more, sequence identity to an amino acid sequence corresponding to residues 24-79 or residues 215-270 of the engineered meganucleases exemplified herein (i.e., SEQ ID NOs: 11-33, 36-43, 46-67, 70-89, 92-118, 121-135, 138-156, 159-183, 186-199, 202-219, 222-243, 246-247, 250-266, 269-291, 294-313, 316-325, 328-330, 333-340, 343-357, 360-389, 392-399, 402-433, 436-462, 465-495, 498-501, and 504-529), such that the variant HVR regions maintain the biological activity of the engineered meganuclease (i.e., binding to and cleaving the recognition sequence). Further, in some embodiments of the invention, a variant HVR1 region or variant HVR2 region can comprise residues corresponding to the amino acid residues found at specific positions within the parental HVR. In this context, “corresponding to” means that an amino acid residue in the variant HVR is the same amino acid residue (i.e., a separate identical residue) present in the parental HVR sequence in the same relative position (i.e., in relation to the remaining amino acids in the parent sequence). By way of example, if a parental HVR sequence comprises a serine residue at position 26, a variant HVR that “comprises a residue corresponding to” residue 26 will also comprise a serine at a position that is relative (i.e., corresponding) to parental position 26.

[1161] In particular embodiments, engineered meganucleases of the invention comprise an HVR1 that has at least 80%, at least 81%, at least 82%, at least 83%, at least 84%, at least 85%, at least 86%, at least 87%, at least 88%, at least 89%, at least 90%, at least 91%, at least 92%, at least 93%, at least 94%, at least 95%, at least 96%, at least 97%, at least 98%, at least 99%, or more sequence identity to an amino acid sequence corresponding to residues 24-79 of SEQ ID NOs: 11-33, 36-43, 46-67, 70-89, 92-118, 121-135, 138-156, 159-183, 186-199, 202-219, 222-243, 246-247, 250-266, 269-291, 294-313, 316-325, 328-330, 333-340, 343-357, 360-389, 392-399, 402-433, 436-462, 465-495, 498-501, or 504-529.

[1162] In certain embodiments, engineered meganucleases of the invention comprise an HVR2 that has 80%, at least 81%, at least 82%, at least 83%, at least 84%, at least 85%, at least 86%, at least 87%, at least 88%, at least 89%, at least 90%, at least 91%, at least 92%, at least 93%, at least 94%, at least 95%, at least 96%, at least 97%, at least 98%, at least 99%, or more sequence identity to an amino acid sequence corresponding to residues 215-270 of SEQ ID NOs: 11-33, 36-43, 46-67, 70-89, 92-118, 121-135, 138-156, 159-183, 186-199, 202-219, 222-243, 246-247, 250-266, 269-291, 294-313, 316-325, 328-330, 333-340, 343-357, 360-389, 392-399, 402-433, 436-462, 465-495, 498-501, or 504-529.

[1163] A substantial number of amino acid modifications to the DNA recognition domain of the wild-type I-CreI meganuclease have previously been identified (e.g., U.S. Pat. No. 8,021,867) which, singly or in combination, result in engineered meganucleases with specificities altered at individual bases within the DNA recognition sequence half-site, such that the resulting rationally-designed meganucleases have half-site specificities different from the wild-type enzyme. Table A provides potential substitutions that can be made in an engineered meganuclease monomer or subunit to enhance specificity based on the base present at each half-site position (−1 through −9) of a recognition half-site.

TABLE A

| | Favored Sense-Strand Base | | | | | | | | | | |
|---|---|---|---|---|---|---|---|---|---|---|---|
| Posn. | A | C | G | T | A/T | A/C | A/G | C/T | G/T | A/G/T | A/C/G/T |

| | | | | | | | | | | |
|---|---|---|---|---|---|---|---|---|---|---|
| -1 | Y75 | R70* | K70 | Q70* | | | | T46* | | G70 |
| | L75* | H75* | E70* | C70 | | | | | | A70 |
| | C75* | R75* | E75* | L70 | | | | | | S70 |
| | Y139* | H46* | E46* | Y75* | | | | | | G46* |
| | C46* | K46* | D46* | Q75* | | | | | | |
| | A46* | R46* | | H75* | | | | | | |
| | | | | H139 | | | | | | |
| | | | | Q46* | | | | | | |
| | | | | H46* | | | | | | |
| -2 | Q70 | E70 | H70 | Q44* | C44* | | | | | |
| | 744* | D70 | D44* | | | | | | | |
| | A44* | K44* | E44* | | | | | | | |
| | V44* | R44* | | | | | | | | |
| | I44* | | | | | | | | | |
| | L44* | | | | | | | | | |
| | N44* | | | | | | | | | |
| -3 | Q68 | E68 | R68 | M68 | | H68 | | Y68 | K68 | |
| | C24* | F68 | | C68 | | | | | | |
| | I24* | K24* | | L68 | | | | | | |
| | | R24* | | F68 | | | | | | |
| -4 | A26* | E77 | R77 | | | | | S77 | | S26* |
| | Q77 | K26* | E26* | | | | | Q26* | | |
| -5 | | E42 | R42 | | | K28* | C28* | | | M66 |
| | | | | | | | Q42 | | | K66 |
| -6 | Q40 | E40 | R40 | C40 | A40 | | | | | S40 |
| | C28* | R28* | | I40 | A79 | | | | | S28* |
| | | | | V40 | A28* | | | | | |
| | | | | C79 | H28* | | | | | |
| | | | | I79 | | | | | | |
| | | | | V79 | | | | | | |
| | | | | Q28* | | | | | | |
| -7 | N30* | E38 | K38 | I38 | | | C38 | | | H38 |
| | Q38 | K30* | R38 | L38 | | | | | | N38 |
| | | R30* | E30* | | | | | | | Q30* |
| -8 | F33 | E33 | F33 | L33 | | R32* | R33 | | | |
| | Y33 | D33 | H33 | V33 | | | | | | |
| | | | | I33 | | | | | | |
| | | | | F33 | | | | | | |
| | | | | C33 | | | | | | |
| -9 | | E32 | R32 | L32 | | | | D32 | | S32 |
| | | | K32 | V32 | | | | I32 | | N32 |
| | | | | A32 | | | | | | H32 |
| | | | | C32 | | | | | | Q32 |
| | | | | | | | | | | T32 |

Bold entries are wild-type contact residues and do not constitute “modifications” as used herein. An asterisk indicates that the residue contacts the base on the antisense strand.

[1164] Certain modifications can be made in an engineered meganuclease monomer or subunit to modulate DNA-binding affinity and/or activity. For example, an engineered meganuclease monomer or subunit described herein can comprise a G, S, or A at a residue corresponding to position 19 of I-CreI (WO 2009001159), a Y, R, K, or D at a residue corresponding to position 66 of I-CreI and/or an E, Q, or K at a residue corresponding to position 80 of I-CreI (U.S. Pat. No. 8,021,867).

[1165] For polynucleotides, a “variant” comprises a deletion and/or addition of one or more nucleotides at one or more sites within the native polynucleotide. One of skill in the art will recognize that variants of the nucleic acids of the embodiments will be constructed such that the open reading frame is maintained. For polynucleotides, conservative variants include those sequences that, because of the degeneracy of the genetic code, encode the amino acid sequence of one of the polypeptides of the embodiments. Variant polynucleotides include synthetically derived polynucleotides, such as those generated, for example, by using site-directed mutagenesis but which still encode an engineered meganuclease, or an exogenous nucleic acid molecule, or template nucleic acid of the embodiments. Generally, variants of a particular polynucleotide of the embodiments will have at least about 40%, about 45%, about 50%, about 55%, about 60%, about 65%, about 70%, about 75%, about 80%, about 85%, about 90%, about 91%, about 92%, about 93%, about 94%, about 95%, about 96%, about 97%, about 98%, about 99% or more sequence identity to that particular polynucleotide as determined by sequence alignment programs and parameters described elsewhere herein. Variants of a particular polynucleotide of the embodiments (i.e., the reference polynucleotide) can also be evaluated by comparison of the percent sequence identity between the polypeptide encoded by a variant polynucleotide and the polypeptide encoded by the reference polynucleotide.

[1166] The deletions, insertions, and substitutions of the protein sequences encompassed herein are not expected to produce radical changes in the characteristics of the polypeptide. However, when it is difficult to predict the exact effect of the substitution, deletion, or insertion in advance of doing so, one skilled in the art will appreciate that the effect will be evaluated by screening the polypeptide its intended activity. For example, variants of an engineered meganuclease would be screened for their ability to preferentially recognize and cleave a recognition sequence comprising a certain center sequence.

### 2.4 Methods to Optimize I-CreI-Derived Meganucleases

[1167] Compositions and methods are provided herein to improve the DNA cleavage activity properties of an engineered meganuclease derived from I-CreI by modifying at least one position of an I-CreI derived meganuclease corresponding to positions 48, 50, 71, 72, 73, 73B, and 74 of I-CreI (SEQ ID NO: 1). An improvement of the DNA cleavage activity can refer to an increase of about 10%, 25%, 20%, 25%, 30%, 35%, 40%, 45%, 50%, 55%, 60%, 65%, 70%, 75%, 80%, 85%, 90%, 95%, 100% or more compared to a proper control engineered meganuclease. As used herein a control engineered meganuclease refers to an engineered meganuclease having specificity for the same recognition sequence but lacking modifications from wild type I-CreI, or modifications from an engineered I-CreI-derived meganuclease, at one or more of the positions listed herein. In specific embodiments, a control engineered meganuclease refers to an engineered I-CreI-derived meganuclease having specificity for the same recognition sequence but lacking a modification at one or more positions corresponding to positions 48, 50, 71, 72, 73, 73B, and 74 of I-CreI.

[1168] A modification of an engineered meganuclease at a given position can comprise modification of the engineered meganuclease itself, modification of the nucleic acid sequence encoding the engineered meganuclease, or synthetic production of a predetermined amino acid sequence modified from SEQ ID NO: 1 or the sequence of an I-CreI derived meganuclease. Modification of the engineered meganuclease derived from I-CreI itself can be done by any means in the art known to modify amino acid sequence in a site-specific manner.

[1169] In certain embodiments, engineered meganucleases derived from I-CreI are modified by altering, in a site-specific manner, the nucleic acid sequence encoding the I-CreI derived meganuclease. Such modifications can be performed on a nucleic acid sequence encoding the first and/or second subunit of the I-CreI derived engineered meganuclease individually. Nucleic acid sequences encoding individual modified subunits can be expressed and modified subunits subsequently assembled with a linker to produce an I-CreI derived homodimer or heterodimer engineered meganuclease. In some embodiments, the nucleic acid sequence encoding an I-CreI derived engineered meganuclease is modified, in a site-specific manner, such that expression of the modified nucleic acid sequence produces a functional modified I-CreI derived engineered meganuclease.

[1170] Site-specific modification of nucleic acid sequences can be performed by any method known in the art to produce site-specific cleavage, deletions, and/or substitutions. Methods for producing engineered I-CreI-derived nucleases modified at given sites are known in the art, and include homologous recombination, site-directed mutagenesis, and gene fusion, among others. In specific embodiments, standard techniques for gene editing can be used to engineer I-CreI-derived meganucleases at one or more positions described herein that increase the activity of an engineered meganuclease for a recognition sequence comprising a certain center sequence.

[1171] In another aspect of the invention is a method for increasing the cleavage activity of an I-CreI-derived engineered meganuclease that binds and cleaves a meganuclease recognition sequence, wherein said meganuclease recognition sequence comprises a four base pair center sequence comprising a 5′ center sequence half site and a 3′ center sequence half site, wherein the 5′ center sequence half site comprises an AC, AT, CC, CT, GC, GT, TC, or TT pair, and wherein the 3′ center sequence half site comprises an AC, AT, CC, CT, GC, GT, TC, or TT pair, wherein the engineered meganuclease comprises a first subunit and a second subunit, wherein the first subunit and the second subunit each comprise an amino acid sequence derived from SEQ ID NO: 1 (i.e., I-CreI),

[1172] wherein the method comprises modifying the first subunit to comprise one or more residues corresponding to positions 48, 50, 71, 72, 73, 73B, and 74 of SEQ ID NO: 1, wherein the modification(s) is/are based on the 5′ center half site of the center sequence, and wherein the modification(s) is/are selected from the residues provided in Table 183 for each of the 5′ center half sites,

[1173] and optionally wherein the method comprises modifying the second subunit to comprise one or more residues corresponding to positions 48, 50, 71, 72, 73, 73B, and 74 of SEQ ID NO: 1, wherein the modification(s) is/are based on the 3′ center half site of the center sequence, and wherein the modification(s) is/are selected from the residues provided in Table 183 for each of the 3′ center half sites.

[1174] In some embodiments, the 5′ center half site of the center sequence is an AC pair, and the first subunit is modified to comprise one or more of the residues at positions corresponding to positions 48, 50, 71, 72, 73, 73B, and 74 of SEQ ID NO: 1 (i.e., I-CreI) provided in Table 183 for a 5′ center half site AC pair.

[1175] In some embodiments, the 5′ center half site of the center sequence is an AT pair, and the first subunit is modified to comprise one or more of the residues at positions corresponding to positions 48, 50, 71, 72, 73, 73B, and 74 of SEQ ID NO: 1 (i.e., I-CreI) provided in Table 183 for a 5′ center half site AT pair.

[1176] In some embodiments, the 5′ center half site of the center sequence is an CC pair, and the first subunit is modified to comprise one or more of the residues at positions corresponding to positions 48, 50, 71, 72, 73, 73B, and 74 of SEQ ID NO: 1 (i.e., I-CreI) provided in Table 183 for a 5′ center half site CC pair.

[1177] In some embodiments, the 5′ center half site of the center sequence is an CT pair, and the first subunit is modified to comprise one or more of the residues at positions corresponding to positions 48, 50, 71, 72, 73, 73B, and 74 of SEQ ID NO: 1 (i.e., I-CreI) provided in Table 183 for a 5′ center half site CT pair.

[1178] In some embodiments, the 5′ center half site of the center sequence is an GC pair, and the first subunit is modified to comprise one or more of the residues at positions corresponding to positions 48, 50, 71, 72, 73, 73B, and 74 of SEQ ID NO: 1 (i.e., I-CreI) provided in Table 183 for a 5′ center half site GC pair.

[1179] In some embodiments, the 5′ center half site of the center sequence is an GT pair, and the first subunit is modified to comprise one or more of the residues at positions corresponding to positions 48, 50, 71, 72, 73, 73B, and 74 of SEQ ID NO: 1 (i.e., I-CreI) provided in Table 183 for a 5′ center half site GT pair.

[1180] In some embodiments, the 5′ center half site of the center sequence is an TC pair, and the first subunit is modified to comprise one or more of the residues at positions corresponding to positions 48, 50, 71, 72, 73, 73B, and 74 of SEQ ID NO: 1 (i.e., I-CreI) provided in Table 183 for a 5′ center half site TC pair.

[1181] In some embodiments, the 5′ center half site of the center sequence is an TT pair, and the first subunit is modified to comprise one or more of the residues at positions corresponding to positions 48, 50, 71, 72, 73, 73B, and 74 of SEQ ID NO: 1 (i.e., I-CreI) provided in Table 183 for a 5′ center half site TT pair.

[1182] In some embodiments, the 3′ center half site of the center sequence is an AC pair, and the first subunit is modified to comprise one or more of the residues at positions corresponding to positions 48, 50, 71, 72, 73, 73B, and 74 of SEQ ID NO: 1 (i.e., I-CreI) provided in Table 183 for a 3′ center half site AC pair.

[1183] In some embodiments, the 3′ center half site of the center sequence is an AT pair, and the first subunit is modified to comprise one or more of the residues at positions corresponding to positions 48, 50, 71, 72, 73, 73B, and 74 of SEQ ID NO: 1 (i.e., I-CreI) provided in Table 183 for a 3′ center half site AT pair.

[1184] In some embodiments, the 3′ center half site of the center sequence is an CC pair, and the first subunit is modified to comprise one or more of the residues at positions corresponding to positions 48, 50, 71, 72, 73, 73B, and 74 of SEQ ID NO: 1 (i.e., I-CreI) provided in Table 183 for a 3′ center half site CC pair.

[1185] In some embodiments, the 3′ center half site of the center sequence is an CT pair, and the first subunit is modified to comprise one or more of the residues at positions corresponding to positions 48, 50, 71, 72, 73, 73B, and 74 of SEQ ID NO: 1 (i.e., I-CreI) provided in Table 183 for a 3′ center half site CT pair.

[1186] In some embodiments, the 3′ center half site of the center sequence is an GC pair, and the first subunit is modified to comprise one or more of the residues at positions corresponding to positions 48, 50, 71, 72, 73, 73B, and 74 of SEQ ID NO: 1 (i.e., I-CreI) provided in Table 183 for a 3′ center half site GC pair.

[1187] In some embodiments, the 3′ center half site of the center sequence is an GT pair, and the first subunit is modified to comprise one or more of the residues at positions corresponding to positions 48, 50, 71, 72, 73, 73B, and 74 of SEQ ID NO: 1 (i.e., I-CreI) provided in Table 183 for a 3′ center half site GT pair.

[1188] In some embodiments, the 3′ center half site of the center sequence is an TC pair, and the first subunit is modified to comprise one or more of the residues at positions corresponding to positions 48, 50, 71, 72, 73, 73B, and 74 of SEQ ID NO: 1 (i.e., I-CreI) provided in Table 183 for a 3′ center half site TC pair.

[1189] In some embodiments, the 3′ center half site of the center sequence is an TT pair, and the first subunit is modified to comprise one or more of the residues at positions corresponding to positions 48, 50, 71, 72, 73, 73B, and 74 of SEQ ID NO: 1 (i.e., I-CreI) provided in Table 183 for a 3′ center half site TT pair.

### 2.5 Pharmaceutical Compositions

[1190] In some embodiments, the invention provides a pharmaceutical composition comprising a pharmaceutically acceptable carrier and engineered nuclease of the invention, or a pharmaceutically acceptable carrier and an isolated polynucleotide comprising a nucleic acid encoding an engineered nuclease of the invention. In particular, pharmaceutical compositions are provided that comprise a pharmaceutically acceptable carrier and a therapeutically effective amount of a nucleic acid encoding an engineered meganuclease or an engineered meganuclease peptide.

[1191] In other embodiments, the invention provides a pharmaceutical composition comprising a pharmaceutically acceptable carrier and a genetically-modified cell of the invention. The genetically modified cell can be delivered to a desired target tissue where the cell.

[1192] Pharmaceutical compositions of the invention can be useful for treating a subject having a disease in a subject in need of treatment thereof in accordance with the present invention.

[1193] Such pharmaceutical compositions can be prepared in accordance with known techniques. See, e.g., Remington, The Science And Practice of Pharmacy (21st ed., Philadelphia, Lippincott, Williams & Wilkins, 2005). In the manufacture of a pharmaceutical formulation according to the invention, nuclease polypeptides (or DNA/RNA encoding the same or cells expressing the same) are typically admixed with a pharmaceutically acceptable carrier, and the resulting composition is administered to a subject. The carrier must be acceptable in the sense of being compatible with any other ingredients in the formulation and must not be deleterious to the subject. In some embodiments, pharmaceutical compositions of the invention can further comprise one or more additional agents or biological molecules useful in the treatment of a disease in the subject. Likewise, the additional agent(s) and/or biological molecule(s) can be co-administered as a separate composition.

[1194] In particular embodiments of the invention, the pharmaceutical composition comprises viral vectors comprising a nucleic acid sequence encoding an engineered nuclease described herein. Such vectors are known in the art and include retroviral vectors, lentiviral vectors, adenoviral vectors, and adeno-associated virus (AAV) vectors (reviewed in Vannucci, et al. (2013 New Microbiol. 36:1-22). Recombinant AAV vectors useful in the invention can have any serotype that allows for transduction of the virus into a target cell type and expression of the nuclease gene by the target cell. For example, in some embodiments, recombinant AAV vectors have a serotype of AAV2, AAV6, AAV8, or AAV9. In some embodiments, the viral vectors are injected directly into target tissues. In alternative embodiments, the viral vectors are delivered systemically via the circulatory system. It is known in the art that different AAV vectors tend to localize to different tissues. In liver target tissues, effective transduction of hepatocytes has been shown, for example, with AAV serotypes 2, 8, and 9 (Sands (2011) Methods Mol. Biol. 807:141-157). Accordingly, in some embodiments, the AAV serotype is AAV2. In alternative embodiments, the AAV serotype is AAV6. In other embodiments, the AAV serotype is AAV8. In still other embodiments, the AAV serotype is AAV9. AAV vectors can also be self-complementary such that they do not require second-strand DNA synthesis in the host cell (McCarty, et al. (2001) Gene Ther. 8:1248-54). Nucleic acids delivered by recombinant AAV vectors can include left (5′) and right (3′) inverted terminal repeats.

[1195] In particular embodiments of the invention, the pharmaceutical composition comprises one or more mRNAs described herein (e.g., mRNAs encoding engineered nucleases) formulated within lipid nanoparticles.

[1196] The selection of cationic lipids, non-cationic lipids and/or lipid conjugates which comprise the lipid nanoparticle, as well as the relative molar ratio of such lipids to each other, is based upon the characteristics of the selected lipid(s), the nature of the intended target cells, and the characteristics of the mRNA to be delivered. Additional considerations include, for example, the saturation of the alkyl chain, as well as the size, charge, pH, pKa, fusogenicity and toxicity of the selected lipid(s). Thus, the molar ratios of each individual component may be adjusted accordingly.

[1197] The lipid nanoparticles for use in the method of the invention can be prepared by various techniques which are presently known in the art. Nucleic acid-lipid particles and their method of preparation are disclosed in, for example, U.S. Patent Publication Nos. 20040142025 and 20070042031, the disclosures of which are herein incorporated by reference in their entirety for all purposes.

[1198] Selection of the appropriate size of lipid nanoparticles must take into consideration the site of the target cell and the application for which the lipid nanoparticles is being made. Generally, the lipid nanoparticles will have a size within the range of about 25 to about 500 nm. In some embodiments, the lipid nanoparticles have a size from about 50 nm to about 300 nm or from about 60 nm to about 120 nm. The size of the lipid nanoparticles may be determined by quasi-electric light scattering (QELS) as described in Bloomfield, Ann. Rev. Biophys. Bioeng., 10:421\hat{ }150 (1981), incorporated herein by reference. A variety of methods are known in the art for producing a population of lipid nanoparticles of particular size ranges, for example, sonication or homogenization. One such method is described in U.S. Pat. No. 4,737,323, incorporated herein by reference.

[1199] Some lipid nanoparticles contemplated for use in the invention comprise at least one cationic lipid, at least one non-cationic lipid, and at least one conjugated lipid. In more particular examples, lipid nanoparticles can comprise from about 50 mol % to about 85 mol % of a cationic lipid, from about 13 mol % to about 49.5 mol % of a non-cationic lipid, and from about 0.5 mol % to about 10 mol % of a lipid conjugate, and are produced in such a manner as to have a non-lamellar (i.e., non-bilayer) morphology. In other particular examples, lipid nanoparticles can comprise from about 40 mol % to about 85 mol % of a cationic lipid, from about 13 mol % to about 49.5 mol % of a non-cationic lipid, and from about 0.5 mol % to about 10 mol % of a lipid conjugate, and are produced in such a manner as to have a non-lamellar (i.e., non-bilayer) morphology.

[1200] Cationic lipids can include, for example, one or more of the following: palmitoyi-oleoyl-nor-arginine (PONA), MPDACA, GUADACA, ((6Z,9Z,28Z,31Z)-heptatriaconta-6,9,28,31-tetraen-19-yl4-(dimethylamino)butanoate) (MC3), LenMC3, CP-LenMC3, γ-LenMC3, CP-γ-LenMC3, MC3MC, MC2MC, MC3 Ether, MC4 Ether, MC3 Amide, Pan-MC3, Pan-MC4 and Pan MC5, 1,2-dilinoleyloxy-N,N-dimethylaminopropane (DLinDMA), 1,2-dilinolenyloxy-N,N-dimethylaminopropane (DLenDMA), 2,2-dilinoleyl-4-(2-dimethylaminoethyl)-[1,3]-dioxolane (DLin-K-C2-DMA; “XTC2”), 2,2-dilinoleyl-4-(3-dimethylaminopropyl)-[1,3]-dioxolane (DLin-K-C3-DMA), 2,2-dilinoleyl-4-(4-dimethylaminobutyl)-[1,3]-dioxolane (DLin-K-C4-DMA), 2,2-dilinoleyl-5-dimethylaminomethyl-[1,3]-dioxane (DLin-K6-DMA), 2,2-dilinoleyl-4-N-methylpepiazino-[1,3]-dioxolane (DLin-K-MPZ), 2,2-dilinoleyl-4-dimethylaminomethyl-[1,3]-dioxolane (DLin-K-DMA), 1,2-dilinoleylcarbamoyloxy-3-dimethylaminopropane (DLin-C-DAP), 1,2-dilinoleyoxy-3-(dimethylamino)acetoxypropane (DLin-DAC), 1,2-dilinoleyoxy-3-morpholinopropane (DLin-MA), 1,2-dilinoleoyl-3-dimethylaminopropane (DLinDAP), 1,2-dilinoleylthio-3-dimethylaminopropane (DLin-S-DMA), 1-linoleoyl-2-linoleyloxy-3-dimethylaminopropane (DLin-2-DMAP), 1,2-dilinoleyloxy-3-trimethylaminopropane chloride salt (DLin-TMA.Cl), 1,2-dilinoleoyl-3-trimethylaminopropane chloride salt (DLin-TAP.Cl), 1,2-dilinoleyloxy-3-(N-methylpiperazino)propane (DLin-MPZ), 3-(N,N-dilinoleylamino)-1,2-propanediol (DLinAP), 3-(N,N-dioleylamino)-1,2-propanedio (DOAP), 1,2-dilinoleyloxo-3-(2-N,N-dimethylamino)ethoxypropane (DLin-EG-DMA), N,N-dioleyl-N,N-dimethylammonium chloride (DODAC), 1,2-dioleyloxy-N,N-dimethylaminopropane (DODMA), 1,2-distearyloxy-N,N-dimethylaminopropane (DSDMA), N-(1-(2,3-dioleyloxy)propyl)-N,N,N-trimethylammonium chloride (DOTMA), N,N-distearyl-N,N-dimethylammonium bromide (DDAB), N-(1-(2,3-dioleoyloxy)propyl)-N,N,N-trimethylammonium chloride (DOTAP), 3-(N—(N′,N′-dimethylaminoethane)-carbamoyl)cholesterol (DC-Chol), N-(1,2-dimyristyloxyprop-3-yl)-N,N-dimethyl-N-hydroxyethyl ammonium bromide (DMRIE), 2,3-dioleyloxy-N-[2(spermine-carboxamido)ethyl]-N,N-dimethyl-1-propanaminiumtrifluoroacetate (DOSPA), dioctadecylamidoglycyl spermine (DOGS), 3-dimethylamino-2-(cholest-5-en-3-beta-oxybutan-4-oxy)-1-(cis,cis-9,12-octadecadienoxy)propane (CLinDMA), 2[5′-(cholest-5-en-3-beta-oxy)-3′-oxapentoxy)-3-dimethy-1-(cis,cis-9′,1-2′-octadecadienoxy)propane (CpLinDMA), N,N-dimethyl-3,4-dioleyloxybenzylamine (DMOBA), 1,2-N,N′-dioleylcarbamyl-3-dimethylaminopropane (DOcarbDAP), 1,2-N,N′-dilinoleylcarbamyl-3-dimethylaminopropane (DLincarbDAP), or mixtures thereof. The cationic lipid can also be DLinDMA, DLin-K-C2-DMA (“XTC2”), MC3, LenMC3, CP-LenMC3, γ-LenMC3, CP-γ-LenMC3, MC3MC, MC2MC, MC3 Ether, MC4 Ether, MC3 Amide, Pan-MC3, Pan-MC4, Pan MC5, or mixtures thereof.

[1201] In various embodiments, the cationic lipid comprises from about 50 mol % to about 90 mol %, from about 50 mol % to about 85 mol %, from about 50 mol % to about 80 mol %, from about 50 mol % to about 75 mol %, from about 50 mol % to about 70 mol %, from about 50 mol % to about 65 mol %, or from about 50 mol % to about 60 mol % of the total lipid present in the particle.

[1202] In other embodiments, the cationic lipid comprises from about 40 mol % to about 90 mol %, from about 40 mol % to about 85 mol %, from about 40 mol % to about 80 mol %, from about 40 mol % to about 75 mol %, from about 40 mol % to about 70 mol %, from about 40 mol % to about 65 mol %, or from about 40 mol % to about 60 mol % of the total lipid present in the particle.

[1203] The non-cationic lipid may comprise, e.g., one or more anionic lipids and/or neutral lipids. In particular embodiments, the non-cationic lipid comprises one of the following neutral lipid components: (1) cholesterol or a derivative thereof; (2) a phospholipid; or (3) a mixture of a phospholipid and cholesterol or a derivative thereof. Examples of cholesterol derivatives include, but are not limited to, cholestanol, cholestanone, cholestenone, coprostanol, cholesteryl-2′-hydroxyethyl ether, cholesteryl-4′-hydroxybutyl ether, and mixtures thereof. The phospholipid may be a neutral lipid including, but not limited to, dipalmitoylphosphatidylcholine (DPPC), distearoylphosphatidylcholine (DSPC), dioleoylphosphatidylethanolamine (DOPE), palmitoyloleoyl-phosphatidylcholine (POPC), palmitoyloleoyl-phosphatidylethanolamine (POPE), palmitoyloleyol-phosphatidylglycerol (POPG), dipalmitoyl-phosphatidylethanolamine (DPPE), dimyristoyl-phosphatidylethanolamine (DMPE), distearoyl-phosphatidylethanolamine (DSPE), monomethyl-phosphatidylethanolamine, dimethyl-phosphatidylethanolamine, dielaidoyl-phosphatidylethanolamine (DEPE), stearoyloleoyl-phosphatidylethanolamine (S OPE), egg phosphatidylcholine (EPC), and mixtures thereof. In certain particular embodiments, the phospholipid is DPPC, DSPC, or mixtures thereof.

[1204] In some embodiments, the non-cationic lipid (e.g., one or more phospholipids and/or cholesterol) comprises from about 10 mol % to about 60 mol %, from about 15 mol % to about 60 mol %, from about 20 mol % to about 60 mol %, from about 25 mol % to about 60 mol %, from about 30 mol % to about 60 mol %, from about 10 mol % to about 55 mol %, from about 15 mol % to about 55 mol %, from about 20 mol % to about 55 mol %, from about 25 mol % to about 55 mol %, from about 30 mol % to about 55 mol %, from about 13 mol % to about 50 mol %, from about 15 mol % to about 50 mol % or from about 20 mol % to about 50 mol % of the total lipid present in the particle. When the non-cationic lipid is a mixture of a phospholipid and cholesterol or a cholesterol derivative, the mixture may comprise up to about 40, 50, or 60 mol % of the total lipid present in the particle.

[1205] The conjugated lipid that inhibits aggregation of particles may comprise, e.g., one or more of the following: a polyethyleneglycol (PEG)-lipid conjugate, a polyamide (ATTA)-lipid conjugate, a cationic-polymer-lipid conjugates (CPLs), or mixtures thereof. In one particular embodiment, the nucleic acid-lipid particles comprise either a PEG-lipid conjugate or an ATTA-lipid conjugate. In certain embodiments, the PEG-lipid conjugate or ATTA-lipid conjugate is used together with a CPL. The conjugated lipid that inhibits aggregation of particles may comprise a PEG-lipid including, e.g., a PEG-diacylglycerol (DAG), a PEG dialkyloxypropyl (DAA), a PEG-phospholipid, a PEG-ceramide (Cer), or mixtures thereof. The PEG-DAA conjugate may be PEG-di lauryloxypropyl (C12), a PEG-dimyristyloxypropyl (C14), a PEG-dipalmityloxypropyl (C16), a PEG-distearyloxypropyl (C18), or mixtures thereof.

[1206] Additional PEG-lipid conjugates suitable for use in the invention include, but are not limited to, mPEG2000-1,2-di-O-alkyl-sn3-carbomoylglyceride (PEG-C-DOMG). The synthesis of PEG-C-DOMG is described in PCT Application No. PCT/US08/88676. Yet additional PEG-lipid conjugates suitable for use in the invention include, without limitation, 1-[8′-(1,2-dimyristoyl-3-propanoxy)-carboxamido-3′,6′-dioxaoctanyl]carbamoyl-ω-methyl-poly(ethylene glycol) (2KPEG-DMG). The synthesis of 2KPEG-DMG is described in U.S. Pat. No. 7,404,969.

[1207] In some cases, the conjugated lipid that inhibits aggregation of particles (e.g., PEG-lipid conjugate) may comprise from about 0.1 mol % to about 2 mol %, from about 0.5 mol % to about 2 mol %, from about 1 mol % to about 2 mol %, from about 0.6 mol % to about 1.9 mol %, from about 0.7 mol % to about 1.8 mol %, from about 0.8 mol % to about 1.7 mol %, from about 1 mol % to about 1.8 mol %, from about 1.2 mol % to about 1.8 mol %, from about 1.2 mol % to about 1.7 mol %, from about 1.3 mol % to about 1.6 mol %, from about 1.4 mol % to about 1.5 mol %, or about 1, 1.1, 1.2, 1.3, 1.4, 1.5, 1.6, 1.7, 1.8, 1.9, or 2 mol % (or any fraction thereof or range therein) of the total lipid present in the particle. Typically, in such instances, the PEG moiety has an average molecular weight of about 2,000 Daltons. In other cases, the conjugated lipid that inhibits aggregation of particles (e.g., PEG-lipid conjugate) may comprise from about 5.0 mol % to about 10 mol %, from about 5 mol % to about 9 mol %, from about 5 mol % to about 8 mol %, from about 6 mol % to about 9 mol %, from about 6 mol % to about 8 mol %, or about 5 mol %, 6 mol %, 7 mol %, 8 mol %, 9 mol %, or 10 mol % (or any fraction thereof or range therein) of the total lipid present in the particle. Typically, in such instances, the PEG moiety has an average molecular weight of about 750 Daltons.

[1208] In other embodiments, the composition comprises amphoteric liposomes, which contain at least one positive and at least one negative charge carrier, which differs from the positive one, the isoelectric point of the liposomes being between 4 and 8. This objective is accomplished owing to the fact that liposomes are prepared with a pH-dependent, changing charge.

[1209] Liposomal structures with the desired properties are formed, for example, when the amount of membrane-forming or membrane-based cationic charge carriers exceeds that of the anionic charge carriers at a low pH and the ratio is reversed at a higher pH. This is always the case when the ionizable components have a pKa value between 4 and 9. As the pH of the medium drops, all cationic charge carriers are charged more and all anionic charge carriers lose their charge.

[1210] Cationic compounds useful for amphoteric liposomes include those cationic compounds previously described herein above. Without limitation, strongly cationic compounds can include, for example: DC-Choi 3-β-[N—(N′,N′-dimethylmethane) carbamoyl] cholesterol, TC-Choi 3-β-[N—(N′, N′, N′-trimethylaminoethane) carbamoyl cholesterol, BGSC bisguanidinium-spermidine-cholesterol, BGTC bis-guadinium-tren-cholesterol, DOTAP (1,2-dioleoyloxypropyl)-N,N,N-trimethylammonium chloride, DOSPER (1,3-dioleoyloxy-2-(6-carboxy-spermyl)-propylarnide, DOTMA (1,2-dioleoyloxypropyl)-N,N,N-trimethylamronium chloride) (Lipofectin®), DORIE 1,2-dioleoyloxypropyl)-3-dimethylhydroxyethylammonium bromide, DOSC (1,2-dioleoyl-3-succinyl-sn-glyceryl choline ester), DOGSDSO (1,2-dioleoyl-sn-glycero-3-succinyl-2-hydroxyethyl disulfide omithine), DDAB dimethyldioctadecylammonium bromide, DOGS ((C18)2GlySper3+) N,N-dioctadecylamido-glycol-spermin (Transfectam®) (C18)2Gly+N,N-dioctadecylamido-glycine, CTAB cetyltrimethylarnmonium bromide, CpyC cetylpyridinium chloride, DOEPC 1,2-dioleoly-sn-glycero-3-ethylphosphocholine or other O-alkyl-phosphatidylcholine or ethanolamines, amides from lysine, arginine or ornithine and phosphatidyl ethanolamine.

[1211] Examples of weakly cationic compounds include, without limitation: His-Chol (histaminyl-cholesterol hemisuccinate), Mo-Chol (morpholine-N-ethylamino-cholesterol hemisuccinate), or histidinyl-PE.

[1212] Examples of neutral compounds include, without limitation: cholesterol, ceramides, phosphatidyl cholines, phosphatidyl ethanolamines, tetraether lipids, or diacyl glycerols.

[1213] Anionic compounds useful for amphoteric liposomes include those non-cationic compounds previously described herein. Without limitation, examples of weakly anionic compounds can include: CHEMS (cholesterol hemisuccinate), alkyl carboxylic acids with 8 to 25 carbon atoms, or diacyl glycerol hemisuccinate. Additional weakly anionic compounds can include the amides of aspartic acid, or glutamic acid and PE as well as PS and its amides with glycine, alanine, glutamine, asparagine, serine, cysteine, threonine, tyrosine, glutamic acid, aspartic acid or other amino acids or aminodicarboxylic acids. According to the same principle, the esters of hydroxycarboxylic acids or hydroxydicarboxylic acids and PS are also weakly anionic compounds.

[1214] In some embodiments, amphoteric liposomes contain a conjugated lipid, such as those described herein above. Particular examples of useful conjugated lipids include, without limitation, PEG-modified phosphatidylethanolamine and phosphatidic acid, PEG-ceramide conjugates (e.g., PEG-CerC14 or PEG-CerC20), PEG-modified dialkylamines and PEG-modified 1,2-diacyloxypropan-3-amines. Some particular examples are PEG-modified diacylglycerols and dialkylglycerols.

[1215] In some embodiments, the neutral lipids comprise from about 10 mol % to about 60 mol %, from about 15 mol % to about 60 mol %, from about 20 mol % to about 60 mol %, from about 25 mol % to about 60 mol %, from about 30 mol % to about 60 mol %, from about 10 mol % to about 55 mol %, from about 15 mol % to about 55 mol %, from about 20 mol % to about 55 mol %, from about 25 mol % to about 55 mol %, from about 30 mol % to about 55 mol %, from about 13 mol % to about 50 mol %, from about 15 mol % to about 50 mol % or from about 20 mol % to about 50 mol % of the total lipid present in the particle.

[1216] In some cases, the conjugated lipid that inhibits aggregation of particles (e.g., PEG-lipid conjugate) comprises from about 0.1 mol % to about 2 mol %, from about 0.5 mol % to about 2 mol %, from about 1 mol % to about 2 mol %, from about 0.6 mol % to about 1.9 mol %, from about 0.7 mol % to about 1.8 mol %, from about 0.8 mol % to about 1.7 mol %, from about 1 mol % to about 1.8 mol %, from about 1.2 mol % to about 1.8 mol %, from about 1.2 mol % to about 1.7 mol %, from about 1.3 mol % to about 1.6 mol %, from about 1.4 mol % to about 1.5 mol %, or about 1, 1.1, 1.2, 1.3, 1.4, 1.5, 1.6, 1.7, 1.8, 1.9, or 2 mol % (or any fraction thereof or range therein) of the total lipid present in the particle. Typically, in such instances, the PEG moiety has an average molecular weight of about 2,000 Daltons. In other cases, the conjugated lipid that inhibits aggregation of particles (e.g., PEG-lipid conjugate) may comprise from about 5.0 mol % to about 10 mol %, from about 5 mol % to about 9 mol %, from about 5 mol % to about 8 mol %, from about 6 mol % to about 9 mol %, from about 6 mol % to about 8 mol %, or about 5 mol %, 6 mol %, 7 mol %, 8 mol %, 9 mol %, or 10 mol % (or any fraction thereof or range therein) of the total lipid present in the particle. Typically, in such instances, the PEG moiety has an average molecular weight of about 750 Daltons.

[1217] Considering the total amount of neutral and conjugated lipids, the remaining balance of the amphoteric liposome can comprise a mixture of cationic compounds and anionic compounds formulated at various ratios. The ratio of cationic to anionic lipid may selected in order to achieve the desired properties of nucleic acid encapsulation, zeta potential, pKa, or other physicochemical property that is at least in part dependent on the presence of charged lipid components.

### 2.6 Methods for Producing Recombinant Viruses

[1218] In some embodiments, the invention provides recombinant viruses (i.e., recombinant viral vectors; e.g., recombinant AAVs) for use in the methods of the invention. Recombinant AAVs are typically produced in mammalian cell lines such as HEK-293. Because the viral cap and rep genes are removed from the recombinant virus to prevent its self-replication to make room for the therapeutic gene(s) to be delivered (e.g. the nuclease gene), it is necessary to provide these in trans in the packaging cell line. In addition, it is necessary to provide the “helper” (e.g. adenoviral) components necessary to support replication (Cots et al. (2013), Curr. Gene Ther. 13(5): 370-81). Frequently, recombinant AAVs are produced using a triple-transfection in which a cell line is transfected with a first plasmid encoding the “helper” components, a second plasmid comprising the cap and rep genes, and a third plasmid comprising the viral ITRs containing the intervening DNA sequence to be packaged into the virus. Viral particles comprising a genome (ITRs and intervening gene(s) of interest) encased in a capsid are then isolated from cells by freeze-thaw cycles, sonication, detergent, or other means known in the art. Particles are then purified using cesium-chloride density gradient centrifugation or affinity chromatography and subsequently delivered to the gene(s) of interest to cells, tissues, or an organism such as a human patient.

[1219] Because recombinant AAV particles are typically produced (manufactured) in cells, precautions must be taken in practicing the current invention to ensure that the engineered nuclease is not expressed in the packaging cells. Because the viral genomes of the invention may comprise a recognition sequence for the nuclease, any nuclease expressed in the packaging cell line may be capable of cleaving the viral genome before it can be packaged into viral particles. This will result in reduced packaging efficiency and/or the packaging of fragmented genomes. Several approaches can be used to prevent nuclease expression in the packaging cells.

[1220] The nuclease can be placed under the control of a tissue-specific promoter that is not active in the packaging cells. For example, if a viral vector is developed for delivery of a nuclease gene(s) to muscle tissue, a muscle-specific promoter can be used. Examples of muscle-specific promoters include C5-12 (Liu, et al. (2004) Hum Gene Ther. 15:783-92), the muscle-specific creatine kinase (MCK) promoter (Yuasa, et al. (2002) Gene Ther. 9:1576-88), or the smooth muscle 22 (SM22) promoter (Haase, et al. (2013) BMC Biotechnol. 13:49-54). Examples of CNS (neuron)-specific promoters include the NSE, Synapsin, and MeCP2 promoters (Lentz, et al. (2012) Neurobiol Dis. 48:179-88). Examples of liver-specific promoters include, for example, albumin promoters (such as Palb), human al-antitrypsin (such as Pa1AT), and hemopexin (such as Phpx) (Kramer et al., (2003) Mol. Therapy 7:375-85), hybrid liver-specific promoter (hepatic locus control region from ApoE gene (ApoE-HCR) and a liver-specific alpha1-antitrypsin promoter), human thyroxine binding globulin (TBG) promoter, and apolipoprotein A-II promoter. Examples of eye-specific promoters include opsin, and corneal epithelium-specific K12 promoters (Martin et al. (2002) Methods (28): 267-75) (Tong et al., (2007) J Gene Med, 9:956-66). These promoters, or other tissue-specific promoters known in the art, are not highly-active in HEK-293 cells and, thus, will not be expected to yield significant levels of nuclease gene expression in packaging cells when incorporated into viral vectors of the present invention. Similarly, the recombinant viruses of the present invention contemplate the use of other cell lines with the use of incompatible tissue specific promoters (i.e., the well-known HeLa cell line (human epithelial cell) and using the liver-specific hemopexin promoter). Other examples of tissue specific promoters include: synovial sarcomas PDZD4 (cerebellum), C6 (liver), ASBS (muscle), PPP1R12B (heart), SLC5A12 (kidney), cholesterol regulation APOM (liver), ADPRHL1 (heart), and monogenic malformation syndromes TP73L (muscle). (Jacox et al., (2010), PLoS One v.5(8):e12274).

[1221] Alternatively, the recombinant virus can be packaged in cells from a different species in which the nuclease is not likely to be expressed. For example, viral particles can be produced in microbial, insect, or plant cells using mammalian promoters, such as the well-known cytomegalovirus- or SV40 virus-early promoters, which are not active in the non-mammalian packaging cells. In a particular embodiment, viral particles are produced in insect cells using the baculovirus system as described by Gao, et al. (Gao et al. (2007), J. Biotechnol. 131(2):138-43). A nuclease under the control of a mammalian promoter is unlikely to be expressed in these cells (Airenne et al. (2013), Mol. Ther. 21(4):739-49). Moreover, insect cells utilize different mRNA splicing motifs than mammalian cells. Thus, it is possible to incorporate a mammalian intron, such as the human growth hormone (HGH) intron or the SV40 large T antigen intron, into the coding sequence of a nuclease. Because these introns are not spliced efficiently from pre-mRNA transcripts in insect cells, insect cells will not express a functional nuclease and will package the full-length genome. In contrast, mammalian cells to which the resulting recombinant AAV particles are delivered will properly splice the pre-mRNA and will express functional nuclease protein. Haifeng Chen has reported the use of the HGH and SV40 large T antigen introns to attenuate expression of the toxic proteins barnase and diphtheria toxin fragment A in insect packaging cells, enabling the production of recombinant AAV vectors carrying these toxin genes (Chen, H (2012) Mol Ther Nucleic Acids. 1(11): e57).

[1222] The nuclease gene can be operably linked to an inducible promoter such that a small-molecule inducer is required for nuclease expression. Examples of inducible promoters include the Tet-On system (Clontech; Chen et al. (2015), BMC Biotechnol. 15(1):4)) and the RheoSwitch system (Intrexon; Sowa et al. (2011), Spine, 36(10): E623-8). Both systems, as well as similar systems known in the art, rely on ligand-inducible transcription factors (variants of the Tet Repressor and Ecdysone receptor, respectively) that activate transcription in response to a small-molecule activator (Doxycycline or Ecdysone, respectively). Practicing the current invention using such ligand-inducible transcription activators includes: 1) placing the nuclease gene under the control of a promoter that responds to the corresponding transcription factor, the nuclease gene having (a) binding site(s) for the transcription factor; and 2) including the gene encoding the transcription factor in the packaged viral genome. The latter step is necessary because the nuclease will not be expressed in the target cells or tissues following recombinant AAV delivery if the transcription activator is not also provided to the same cells. The transcription activator then induces nuclease gene expression only in cells or tissues that are treated with the cognate small-molecule activator. This approach is advantageous because it enables nuclease gene expression to be regulated in a spatio-temporal manner by selecting when and to which tissues the small-molecule inducer is delivered. However, the requirement to include the inducer in the viral genome, which has significantly limited carrying capacity, creates a drawback to this approach.

[1223] In another particular embodiment, recombinant AAV particles are produced in a mammalian cell line that expresses a transcription repressor that prevents expression of the nuclease. Transcription repressors are known in the art and include the Tet-Repressor, the Lac-Repressor, the Cro repressor, and the Lambda-repressor. Many nuclear hormone receptors such as the ecdysone receptor also act as transcription repressors in the absence of their cognate hormone ligand. To practice the current invention, packaging cells are transfected/transduced with a vector encoding a transcription repressor and the nuclease gene in the viral genome (packaging vector) is operably linked to a promoter that is modified to comprise binding sites for the repressor such that the repressor silences the promoter. The gene encoding the transcription repressor can be placed in a variety of positions. It can be encoded on a separate vector; it can be incorporated into the packaging vector outside of the ITR sequences; it can be incorporated into the cap/rep vector or the adenoviral helper vector; or it can be stably integrated into the genome of the packaging cell such that it is expressed constitutively. Methods to modify common mammalian promoters to incorporate transcription repressor sites are known in the art. For example, Chang and Roninson modified the strong, constitutive CMV and RSV promoters to comprise operators for the Lac repressor and showed that gene expression from the modified promoters was greatly attenuated in cells expressing the repressor (Chang and Roninson (1996), Gene 183:137-42). The use of a non-human transcription repressor ensures that transcription of the nuclease gene will be repressed only in the packaging cells expressing the repressor and not in target cells or tissues transduced with the resulting recombinant AAV.

### EXAMPLES

[1224] This invention is further illustrated by the following examples, which should not be construed as limiting. Those skilled in the art will recognize, or be able to ascertain, using no more than routine experimentation, numerous equivalents to the specific substances and procedures described herein. Such equivalents are intended to be encompassed in the scope of the claims that follow the examples below.

### Example 1

### Characterization of Engineered Meganucleases with Specificity for Recognition Sequences Having Particular Four Base Pair Center Sequences

[1225] These studies were conducted to identify positions and residues within I-CreI-derived subunits that affect the activity of the nuclease for recognition sequences having specific four base pair center sequences. Those center sequences evaluated herein include: ACAA, ACAG, ACAT, ACGA, ACGC, ACGG, ACGT, ATAA, ATAG, ATAT, ATGA, ATGG, TTGG, GCAA, GCAT, GCGA, GCAG, TCAA, TTAA, GTAA, GTAG, GTAT, GTGA, GTGC, GTGG, and GTGT.

[1226] To perform these studies, a system was developed that utilized an I-CreI-derived meganuclease referred to as LOX 3-4x.109, the sequence of which is set forth in SEQ ID NO: 8. Previously, LOX 3-4x.109 nuclease was engineered at particular positions such that it has specificity for a recognition sequence referred to as LOX 3-4, the sequence of which is set forth in SEQ ID NO: 6. In these studies, both the LOX 3-4 recognition sequence, and the LOX 3-4x.109 meganuclease, were further modified. The LOX 3-4 recognition sequence was modified to replace its center sequence (ACAT) with one of the center sequences disclosed above. These modified LOX 3-4 recognition sequences are provided in Table 111 below.

TABLE 111
LOX 3-4 Recognition Sequence Modified
With Different Center Sequences

| Recognition Sequence | SEQ ID NO: |
|---|---|
| LOX 3-4 ACAA | 9 |
| LOX 3-4 ACAG | 34 |
| LOX 3-4 ACAT | 44 |
| LOX 3-4 ACGA | 68 |
| LOX 3-4 ACGC | 90 |
| LOX 3-4 ACGG | 119 |
| LOX 3-4 ACGT | 136 |
| LOX 3-4 ATAA | 157 |
| LOX 3-4 ATAG | 184 |
| LOX 3-4 ATAT | 200 |
| LOX 3-4 ATGA | 220 |
| LOX 3-4 ATGG | 244 |
| LOX 3-4 TTGG | 248 |
| LOX 3-4 GCAA | 267 |
| LOX 3-4 GCAT | 292 |
| LOX 3-4 GCGA | 314 |
| LOX 3-4 GCAG | 326 |
| LOX 3-4 TCAA | 331 |
| LOX 3-4 TTAA | 341 |
| LOX 3-4 GTAA | 358 |
| LOX 3-4 GTAG | 390 |
| LOX 3-4 GTAT | 400 |
| LOX 3-4 GTGA | 434 |
| LOX 3-4 GTGC | 463 |
| LOX 3-4 GTGG | 496 |
| LOX 3-4 GTGT | 504 |

[1227] The LOX 3-4x.109 meganuclease was then modified in one subunit, or in both subunits, to identify positions and residues that may affect the ability of the nuclease to recognize and cleave the modified LOX 3-4 recognition sequence. Structurally, LOX 3-4x.109 comprises an N-terminal nuclease-localization signal derived from SV40, a first I-CreI-derived subunit, a linker sequence, and a second I-CreI-derived subunit. One subunit binds to the LOX 3 recognition half-site of SEQ ID NO: 6, while the other subunit binds to the LOX4 recognition half-site of SEQ ID NO: 6. The first and second subunits of LOX 3-4x.109 each comprise a 56 base pair hypervariable region, referred to as HVR1 and HVR2, respectively. The HVR1 region in the first subunit consists of residues 24-79 of SEQ ID NO: 8, whereas the HVR2 region in the second subunit consists of residues 215-270 of SEQ ID NO: 8. In these studies, LOX 3-4x.109 was modified at positions both within the HVR regions, and outside the HVR regions, to generate novel meganucleases with altered activity, affinity, and/or specificity. Notably, the positions in the LOX 3-4x.109 meganuclease that were originally modified from wild-type I-CreI to confer specificity for each subunit for LOX 3-4 were not further modified. As such, any alterations in activity observed in these studies demonstrate are related to the center sequence.

[1228] A CHO cell reporter system (see WO/2012/167192, FIG. 3) was used to determine whether the engineered meganucleases generated in these studies could recognize and cleave the modified LOX 3-4 recognition sequences in Table 87. To perform the assay, a pair of CHO cell reporter lines were produced, which carried a non-functional Green Fluorescent Protein (GFP) gene expression cassette integrated into the genome of the cell. The GFP gene in each cell line was interrupted by a pair of recognition sequences such that intracellular cleavage of either recognition sequence by a meganuclease would stimulate a homologous recombination event resulting in a functional GFP gene. In both cell lines, one of the recognition sequences was derived from the LOX 3-4 recognition sequence (i.e., those sequences disclosed in Table 87), and the second recognition sequence was specifically recognized by a control meganuclease called “CHO 23/24.” CHO reporter cells comprising a recognition sequence derived from the LOX 3-4 recognition sequence and the CHO 23/24 recognition sequence are referred to herein as “test cells.”

[1229] Test cells were transfected with plasmid DNA encoding an engineered meganuclease which had been optimized for a corresponding center sequence. For example, DNA encoding an engineered meganuclease optimized against an ATAT center sequence would be transfected into CHO cells in which the integrated LOX 3-4 recognition sequence comprises an ATAT center sequence. In some of the experiments, the LOX 3-4x.109 engineered meganuclease (SEQ ID NO: 8) was transfected as an additional control for cutting of modified LOX 3-4 recognition sequences. 4e⁵ CHO cells were transfected with 50 ng of plasmid DNA in a 96-well plate using Lipofectamine 2000 (ThermoFisher) according to the manufacturer's instructions. At 48 hours post-transfection, cells were evaluated by flow cytometry to determine the percentage of GFP-positive cells compared to an untransfected negative control (LOX 3-4 bs). In some instances, substitutions of particular residues at certain positions, including one or more positions corresponding to positions 48, 50, 71, 72, 73, and 74 of I-CreI, was found to produce GFP-positive cells in cell lines comprising the modified LOX 3-4 recognition sequences provided in table 87, at frequencies significantly exceeding the negative control and comparable to or exceeding the CHO 23/24 positive control (see, Examples 2-27).

### Example 2

### Engineered Meganucleases Cleaving Recognition Sequences Containing an ACAA Four Base Pair Center Sequence

[1230] Novel engineered meganucleases derived from the LOX 3-4x.109 meganuclease were prepared by making amino acid substitutions at one or more positions in the first subunit and one or more positions in the second subunit. These engineered meganucleases were then evaluated for cleavage of the LOX 3-4 recognition sequence modified to have an ACAA center sequence (SEQ ID NO: 9) in the CHO reporter assay according to Example 1. The substitutions in each subunit are provided in Tables 112 and 113, respectively. The results of the CHO reporter assay are provided in Table 114.

[1231] Following the modifications shown below, substantial improvements in cleavage of the recognition sequence having the ACAA four base pair center sequence were observed.

TABLE 112
Meganucleases Optimized for ACAA Center
Sequence (First Subunit - Lox3)

| | | I-CreI Position | | | | | | | |
|---|---|---|---|---|---|---|---|---|---|
| | | 19 | 48 | 50 | 71 | 72 | 73 | 80 | 139 |
| Nuclease | SEQ ID | 19 | 48 | 50 | 71 | 72 | 73 | 80 | 139 |
| x.109 | 8 | A | K | Q | G | R | A | Q | K |
| m.680 | 11 | G | K | C | G | R | A | Q | K |
| m.683 | 12 | A | K | R | G | R | A | Q | K |
| m.684 | 13 | A | K | R | G | R | A | Q | K |
| m.691 | 14 | G | K | R | G | R | A | Q | K |
| m.693 | 15 | G | K | R | G | R | A | E | K |
| m.701 | 16 | G | K | R | G | R | A | Q | K |
| m.708 | 17 | G | K | C | R | Q | C | E | K |
| m.714 | 18 | A | K | R | G | R | A | Q | K |
| m.731 | 19 | A | K | R | G | R | A | Q | K |
| m.739 | 20 | G | K | R | G | R | A | Q | K |
| m.741 | 21 | G | K | T | G | R | A | Q | K |
| m.742 | 22 | G | K | R | G | R | A | Q | K |
| m.743 | 23 | G | K | T | G | R | A | Q | K |
| m.744 | 24 | G | K | R | G | R | A | Q | K |
| m.747 | 25 | G | K | K | G | R | A | E | K |
| m.750 | 26 | A | K | C | G | R | A | Q | K |
| m.756 | 27 | A | K | R | G | R | A | Q | K |
| m.757 | 28 | A | K | C | G | R | A | Q | K |
| m.759 | 29 | G | K | S | G | R | A | Q | K |
| m.762 | 30 | G | K | R | G | R | A | Q | K |
| m.765 | 31 | A | K | R | G | R | A | Q | R |
| m.770 | 32 | A | L | R | G | R | A | Q | K |
| m.771 | 33 | G | K | R | G | R | A | Q | K |

TABLE 113
Meganucleases Optimized for ACAA Center Sequence (Second Subunit - Lox4)

| | | I-CreI Position | | | | | | | | | | | |
|---|---|---|---|---|---|---|---|---|---|---|---|---|---|
| | SEQ | 19 | 48 | 50 | 66 | 71 | 72 | 73 | 74 | 80 | 92 | 117 | 139 |
| Nuclease | ID | 210 | 239 | 241 | 257 | 262 | 263 | 264 | 265 | 271 | 283 | 308 | 330 |
| x.109 | 8 | G | H | S | Y | S | T | H | S | Q | Q | E | K |
| m.680 | 11 | A | K | C | Y | G | R | V | T | E | Q | E | R |
| m.683 | 12 | G | T | R | Y | G | R | I | S | E | Q | E | K |
| m.684 | 13 | G | S | R | Y | G | T | I | T | E | Q | E | R |
| m.691 | 14 | A | S | K | Y | G | N | I | S | E | Q | E | K |
| m.693 | 15 | A | A | K | Y | G | S | V | T | Q | Q | E | R |
| m.701 | 16 | A | K | E | Y | A | G | I | S | Q | Q | E | R |
| m.708 | 17 | A | S | C | Y | G | S | V | S | Q | Q | E | R |
| m.714 | 18 | G | A | R | Y | G | R | I | S | E | Q | E | K |
| m.731 | 19 | G | S | E | Y | G | R | I | A | Q | Q | E | K |
| m.739 | 20 | A | S | T | Y | G | R | I | S | E | Q | E | R |
| m.741 | 21 | A | S | K | Y | G | R | V | A | E | R | E | R |
| m.742 | 22 | A | S | K | Y | G | S | I | S | E | Q | E | R |
| m.743 | 23 | A | A | E | Y | G | R | I | A | Q | Q | E | R |
| m.744 | 24 | S | S | K | Y | G | R | I | A | E | Q | E | R |
| m.747 | 25 | A | S | R | Y | G | A | I | S | E | Q | G | K |
| m.750 | 26 | G | A | R | Y | G | R | I | S | E | Q | E | R |
| m.756 | 27 | G | S | K | C | G | T | I | T | E | Q | E | R |
| m.757 | 28 | G | K | E | Y | G | S | V | S | E | Q | E | R |
| m.759 | 29 | A | S | K | Y | G | R | I | T | Q | Q | E | R |
| m.762 | 30 | A | A | K | Y | G | P | I | A | E | Q | E | R |
| m.765 | 31 | G | S | R | Y | G | R | I | A | E | Q | E | R |
| m.770 | 32 | G | A | K | Y | G | R | V | S | E | Q | E | K |
| m.771 | 33 | A | T | K | Y | G | P | V | A | Q | Q | E | R |

TABLE 114
CHO iGFFP Assay ATAA Center Sequence Cleavage

| | SEQ ID | |
|---|---|---|
| Meganuclease | NO: | GFP % |
| LOX 3-4bs | — | 0.25% |
| CHO 23/24 | — | 11.34% |
| x.109 | 8 | 0.68 |
| m.680 | 11 | 7.63 |
| m.683 | 12 | 7.62 |
| m.684 | 13 | 9.14 |
| m.691 | 14 | 7.10 |
| m.693 | 15 | 7.67 |
| m.701 | 16 | 8.36 |
| m.708 | 17 | 6.73 |
| m.714 | 18 | 6.62 |
| m.731 | 19 | 6.76 |
| m.739 | 20 | 6.67 |
| m.741 | 21 | 7.82 |
| m.742 | 22 | 7.79 |
| m.743 | 23 | 7.05 |
| m.744 | 24 | 6.89 |
| m.747 | 25 | 7.11 |
| m.750 | 26 | 9.32 |
| m.756 | 27 | 8.21 |
| m.757 | 28 | 9.27 |
| m.759 | 29 | 7.98 |
| m.762 | 30 | 8.87 |
| m.765 | 31 | 9.32 |
| m.770 | 32 | 7.23 |
| m.771 | 33 | 7.61 |

### Example 3

### Engineered Meganucleases Cleaving Recognition Sequences Containing an ACAG Four Base Pair Center Sequence

[1232] Novel engineered meganucleases derived from the LOX 3-4x.109 meganuclease were prepared by making amino acid substitutions at one or more positions in the first subunit and one or more positions in the second subunit. In addition, two engineered meganucleases were generated that inserted an additional R residue following position 264, which corresponds to position 73 of wild-type I-CreI. These engineered meganucleases were then evaluated for cleavage of the LOX 3-4 recognition sequence modified to have an ACAG center sequence (SEQ ID NO: 34) in the CHO reporter assay according to Example 1. The substitutions in each subunit are provided in Tables 115 and 116, respectively. The results of the CHO reporter assay are provided in Table 117.

[1233] Following the modifications shown below, substantial improvements in cleavage of the recognition sequence having the ACAG four base pair center sequence were observed.

TABLE 115
Meganucleases Optimized for ACAG Center
Sequence (First Subunit - Lox3)

| | | I-CreI Position | | | | | | |
|---|---|---|---|---|---|---|---|---|
| | SEQ | 19 | 50 | 54 | 71 | 72 | 73 | 80 |
| Nuclease | ID | 19 | 50 | 54 | 71 | 72 | 73 | 80 |
| x.109 | 8 | A | Q | F | G | R | A | Q |
| m.775 | 36 | A | R | I | G | K | A | E |
| m.776 | 37 | A | R | L | R | Q | C | E |
| m.785 | 38 | A | R | I | G | R | A | Q |
| m.788 | 39 | A | R | F | G | R | A | Q |
| m.815 | 40 | G | R | F | G | R | A | Q |
| m.831 | 41 | G | R | F | G | P | A | E |
| m.856 | 42 | A | R | F | G | T | C | Q |
| m.863 | 43 | A | R | F | G | P | A | Q |

TABLE 116
Meganucleases Optimized for ACAG Center Sequence (Second Subunit - Lox4)

| | | I-CreI Position | | | | | | | | | | |
|---|---|---|---|---|---|---|---|---|---|---|---|---|
| | | 19 | 50 | 59 | 66 | 71 | 72 | 73 | X | 80 | 81 | 139 |
| | | Nuclease | | | | | | | | | | |
| | SEQ | 210 | 241 | 250 | 257 | 262 | 263 | 264 | X | 271 | 272 | 330 |
| +1 AA* | ID | 210 | 241 | 250 | 257 | 262 | 263 | 264 | 265* | 272 | 273 | 331 |
| x.109 | 8 | G | S | V | Y | S | T | H | | Q | I | K |
| m.775 | 36 | G | C | V | Y | G | G | R | | Q | I | K |
| m.776 | 37 | G | C | V | Y | G | G | R | | Q | I | R |
| m.785 | 38 | G | C | V | Y | G | G | R | | Q | I | R |
| m.788 | 39 | G | C | V | Y | D | R | R | R | Q | I | K |
| m.815 | 40 | A | C | V | Y | S | R | R | R | Q | I | R |
| m.831 | 41 | S | C | A | H | G | G | R | | Q | I | R |
| m.856 | 42 | G | C | V | Y | G | G | R | | Q | I | R |
| m.863 | 43 | G | C | V | Y | G | G | R | | Q | T | K |

*Refers to engineered meganucleases having an insertion following a position which corresponds to position 73 of I-CreI.

TABLE 117
CHO iGFFP Assay ACAG Center Sequence Cleavage

| | SEQ ID | |
|---|---|---|
| Meganuclease | NO: | GFP % |
| LOX 3-4bs | — | 0.37 |
| CHO 23/24 | — | 11.19 |
| x.109 | 8 | 0.29 |
| m.775 | 36 | 12.15 |
| m.776 | 37 | 10.43 |
| m.785 | 38 | 10.02 |
| m.788 | 39 | 10.49 |
| m.815 | 40 | 9.94 |
| m.831 | 41 | 10.04 |
| m.856 | 42 | 10.76 |
| m.863 | 43 | 9.99 |

### Example 4

### Engineered Meganucleases Cleaving Recognition Sequences Containing an ACAT Four Base Pair Center Sequence

[1234] Novel engineered meganucleases derived from the LOX 3-4x.109 meganuclease were prepared by making amino acid substitutions at one or more positions in the first subunit and one or more positions in the second subunit. These engineered meganucleases were then evaluated for cleavage of the LOX 3-4 recognition sequence, which normally comprises an ACAT center sequence (SEQ ID NO: 44) in the CHO reporter assay according to Example 1. The substitutions in each subunit are provided in Tables 118 and 119, respectively. The results of the CHO reporter assay are provided in Table 120.

[1235] As expected, the LOX 3-4x.109 meganuclease demonstrated activity against the ACAT center sequence normally comprised by the LOX 3-4 recognition sequence. Additionally, novel meganucleases which were modified to comprise the residues recited in the tables below continued to cleave the LOX 3-4 recognition sequence.

TABLE 118
Meganucleases Optimized for ACAT Center
Sequence (First Subunit - Lox3)

| | | I-CreI Position | | | | | | | | |
|---|---|---|---|---|---|---|---|---|---|---|
| | SEQ | 19 | 48 | 50 | 54 | 71 | 72 | 73 | 80 | 139 |
| Nuclease | ID | 19 | 48 | 50 | 54 | 71 | 72 | 73 | 80 | 139 |
| x.109 | 8 | A | K | Q | F | G | R | A | Q | K |
| M.869 | 46 | G | K | S | F | R | T | A | E | H |
| M.873 | 47 | A | S | R | F | G | R | A | Q | K |
| M.877 | 48 | A | K | S | F | G | R | A | Q | K |
| M.883 | 49 | A | K | R | F | G | R | A | Q | K |
| M.885 | 50 | G | I | R | F | G | R | A | Q | K |
| M.886 | 51 | G | K | K | F | G | R | A | Q | K |
| M.893 | 52 | A | K | R | F | G | R | A | Q | K |
| M.901 | 53 | G | K | R | F | G | R | A | Q | K |
| M.910 | 54 | A | K | R | F | G | R | A | Q | K |
| M.917 | 55 | G | K | R | F | G | R | A | Q | K |
| M.919 | 56 | A | K | Q | F | G | R | A | Q | K |
| M.922 | 57 | G | L | K | F | G | R | A | Q | K |
| M.925 | 58 | G | K | R | F | G | R | A | Q | K |
| M.929 | 59 | A | K | R | F | G | R | A | Q | K |
| M.930 | 60 | G | K | R | F | G | R | A | E | K |
| M.933 | 61 | A | L | K | F | G | R | A | Q | K |
| M.937 | 62 | A | K | R | F | G | R | A | Q | K |
| M.941 | 63 | S | K | R | F | G | R | A | Q | K |
| M.942 | 64 | A | K | R | F | G | R | A | Q | R |
| M.945 | 65 | G | K | R | F | G | R | A | Q | K |
| M.949 | 66 | A | N | R | F | G | R | A | Q | K |
| M.950 | 67 | A | K | R | I | G | R | G | Q | K |

TABLE 119
Meganucleases Optimized for ACAT Center Sequence (Second Subunit - Lox4)

| | | I-CreI Position | | | | | | | | | | | |
|---|---|---|---|---|---|---|---|---|---|---|---|---|---|
| | SEQ | 19 | 48 | 50 | 71 | 72 | 73 | 74 | 80 | 81 | 83 | 117 | 139 |
| Nuclease | ID | 210 | 239 | 241 | 262 | 263 | 264 | 265 | 271 | 272 | 274 | 308 | 330 |
| x.109 | 8 | G | H | S | S | T | H | S | Q | I | P | E | K |
| M.869 | 46 | A | H | K | G | K | A | C | Q | I | P | E | R |
| M.873 | 47 | G | H | C | G | A | A | S | Q | I | P | E | K |
| M.877 | 48 | G | H | N | R | S | C | C | Q | T | P | E | R |
| M.883 | 49 | G | H | R | T | R | C | C | E | I | P | E | R |
| M.885 | 50 | G | T | K | G | H | A | S | Q | I | P | E | K |
| M.886 | 51 | A | H | K | K | H | C | C | E | I | P | E | K |
| M.893 | 52 | G | G | K | G | K | A | C | E | I | P | E | K |
| M.901 | 53 | A | A | K | R | H | S | C | Q | I | P | E | R |
| M.910 | 54 | G | H | K | T | K | C | C | Q | I | P | E | T |
| M.917 | 55 | A | S | C | G | T | A | C | Q | I | H | G | T |
| M.919 | 56 | G | H | S | S | T | H | S | Q | I | P | E | K |
| M.922 | 57 | A | H | K | K | A | C | A | E | I | P | E | K |
| M.925 | 58 | A | H | G | G | R | G | C | Q | I | P | E | K |
| M.929 | 59 | G | S | K | R | G | G | C | Q | I | P | E | K |
| M.930 | 60 | S | A | S | G | R | A | C | Q | I | P | E | R |
| M.933 | 61 | G | A | K | R | S | C | C | Q | I | P | E | K |
| M.937 | 62 | G | A | Q | K | S | G | C | Q | I | P | E | K |
| M.941 | 63 | G | A | C | G | T | C | C | Q | I | P | E | H |
| M.942 | 64 | G | S | C | G | H | A | C | Q | I | P | E | K |
| M.945 | 65 | A | L | Q | G | N | S | C | Q | I | P | E | K |
| M.949 | 66 | G | S | K | E | R | A | C | Q | I | P | E | K |
| M.950 | 67 | G | K | C | G | G | R | S | Q | I | P | E | R |

TABLE 120
CHO iGFFP Assay ACAT Center Sequence Cleavage

| | SEQ ID | |
|---|---|---|
| Meganuclease | NO: | GFP % |
| LOX 3-4bs | — | 0.62 |
| CHO 23/24 | — | 13.07 |
| x.109 | 8 | 11.66 |
| M.869 | 46 | 11.22 |
| M.873 | 47 | 9.76 |
| M.877 | 48 | 11.18 |
| M.883 | 49 | 10.82 |
| M.885 | 50 | 11.30 |
| M.886 | 51 | 10.38 |
| M.893 | 52 | 13.13 |
| M.901 | 53 | 9.89 |
| M.910 | 54 | 9.89 |
| M.917 | 55 | 9.83 |
| M.919 | 56 | 11.46 |
| M.922 | 57 | 10.05 |
| M.925 | 58 | 12.22 |
| M.929 | 59 | 10.15 |
| M.930 | 60 | 9.74 |
| M.933 | 61 | 10.82 |
| M.937 | 62 | 12.19 |
| M.941 | 63 | 10.17 |
| M.942 | 64 | 11.76 |
| M.945 | 65 | 11.35 |
| M.949 | 66 | 12.50 |
| M.950 | 67 | 12.27 |

### Example 5

### Engineered Meganucleases Cleaving Recognition Sequences Containing an ACGA Four Base Pair Center Sequence

[1236] Novel engineered meganucleases derived from the LOX 3-4x.109 meganuclease were prepared by making amino acid substitutions at one or more positions in the first subunit and one or more positions in the second subunit. These engineered meganucleases were then evaluated for cleavage of the LOX 3-4 recognition sequence modified to have an ACGA center sequence (SEQ ID NO: 68) in the CHO reporter assay according to Example 1. The substitutions in each subunit are provided in Tables 121 and 122, respectively. The results of the CHO reporter assay are provided in Table 123.

[1237] Following the modifications shown below, substantial improvements in cleavage of the recognition sequence having the ACGA four base pair center sequence were observed.

TABLE 121
Meganucleases Optimized for ACGA Center
Sequence (First Subunit - Lox3)

| | | I-CreI Position | | | | | | | |
|---|---|---|---|---|---|---|---|---|---|
| | SEQ | 19 | 48 | 50 | 71 | 72 | 73 | 80 | 139 |
| Nuclease | ID | 19 | 48 | 50 | 71 | 72 | 73 | 80 | 139 |
| x.109 | 8 | A | K | Q | G | R | A | Q | K |
| m.956 | 70 | G | K | R | G | R | A | Q | K |
| m.961 | 71 | G | K | R | G | R | A | Q | K |
| m.962 | 72 | G | K | R | G | R | A | E | K |
| m.963 | 73 | A | K | W | P | P | A | E | K |
| m.969 | 74 | S | K | R | G | R | A | Q | K |
| m.971 | 75 | A | K | R | G | R | A | Q | K |
| m.977 | 76 | G | K | R | G | R | A | Q | K |
| m.982 | 77 | G | K | A | G | R | A | Q | K |
| m.986 | 78 | A | K | R | G | R | A | Q | K |
| m.993 | 79 | G | K | R | G | R | A | Q | K |
| m.994 | 80 | G | K | R | G | R | A | Q | K |
| m.1001 | 81 | G | K | V | G | R | A | Q | K |
| m.1013 | 82 | G | K | V | G | R | A | Q | K |
| m.1017 | 83 | G | K | R | G | R | A | Q | K |
| m.1018 | 84 | A | K | R | G | R | A | Q | K |
| m.1021 | 85 | G | K | R | G | R | A | Q | K |
| m.1029 | 86 | A | K | R | G | R | A | Q | K |
| m.1036 | 87 | A | K | R | G | R | A | Q | K |
| m.1041 | 88 | G | K | R | G | R | A | Q | K |
| m.1044 | 89 | A | K | T | G | R | A | Q | K |

TABLE 122
Meganucleases Optimized for ACGA Center Sequence (Second Subunit - Lox4)

| | | I-CreI Position | | | | | | | | |
|---|---|---|---|---|---|---|---|---|---|---|
| | SEQ | 19 | 48 | 50 | 71 | 72 | 73 | 74 | 80 | 139 |
| Nuclease | ID | 210 | 239 | 241 | 262 | 263 | 264 | 265 | 271 | 330 |
| x.109 | 8 | A | K | Q | G | R | A | S | Q | K |
| m.956 | 70 | A | A | R | G | R | I | S | E | K |
| m.961 | 71 | A | A | I | G | R | V | A | Q | R |
| m.962 | 72 | A | A | R | G | H | I | A | Q | K |
| m.963 | 73 | G | K | S | G | R | I | A | Q | R |
| m.969 | 74 | G | K | C | G | H | I | A | Q | K |
| m.971 | 75 | G | H | R | G | R | V | S | E | R |
| m.977 | 76 | A | K | V | G | R | I | S | E | K |
| m.982 | 77 | A | A | R | G | R | V | S | Q | R |
| m.986 | 78 | G | K | G | G | R | I | S | Q | R |
| m.993 | 79 | A | A | R | G | R | I | S | E | K |
| m.994 | 80 | A | H | C | G | R | I | S | Q | R |
| m.1001 | 81 | A | H | R | G | R | I | A | E | R |
| m.1013 | 82 | A | H | S | G | R | I | S | Q | K |
| m.1017 | 83 | A | T | R | G | R | I | A | E | R |
| m.1018 | 84 | G | A | R | G | R | I | A | E | R |
| m.1021 | 85 | A | K | C | G | R | I | S | E | K |
| m.1029 | 86 | G | G | R | G | R | I | A | Q | R |
| m.1036 | 87 | G | Q | R | G | R | I | S | Q | R |
| m.1041 | 88 | A | A | I | G | R | V | S | Q | R |
| m.1044 | 89 | G | K | S | G | R | V | S | E | R |

TABLE 123
CHO iGFFP Assay ACGA Center Sequence Cleavage

| | SEQ ID | |
|---|---|---|
| Meganuclease | NO: | GFP % |
| LOX 3-4bs | — | 0.5 |
| CHO 23/24 | — | 11.7 |
| x.109 | 8 | 0.7 |
| m.956 | 70 | 4.7 |
| m.961 | 71 | 2.9 |
| m.962 | 72 | 2.8 |
| m.963 | 73 | 3.1 |
| m.969 | 74 | 3.4 |
| m.971 | 75 | 3.9 |
| m.977 | 76 | 3.2 |
| m.982 | 77 | 2.5 |
| m.986 | 78 | 4.1 |
| m.993 | 79 | 4.1 |
| m.994 | 80 | 3.3 |
| m.1001 | 81 | 4.0 |
| m.1013 | 82 | 1.7 |
| m.1017 | 83 | 4.6 |
| m.1018 | 84 | 4.2 |
| m.1021 | 85 | 3.2 |
| m.1029 | 86 | 3.8 |
| m.1036 | 87 | 5.0 |
| m.1041 | 88 | 4.5 |
| m.1044 | 89 | 5.8 |

### Example 6

### Engineered Meganucleases Cleaving Recognition Sequences Containing an ACGC Four Base Pair Center Sequence

[1238] Novel engineered meganucleases derived from the LOX 3-4x.109 meganuclease were prepared by making amino acid substitutions at one or more positions in the first subunit and one or more positions in the second subunit. These engineered meganucleases were then evaluated for cleavage of the LOX 3-4 recognition sequence modified to have an ACGC center sequence (SEQ ID NO: 90) in the CHO reporter assay according to Example 1. The substitutions in each subunit are provided in Tables 124 and 125, respectively. The results of the CHO reporter assay are provided in Table 126.

[1239] Following the modifications shown below, substantial improvements in cleavage of the recognition sequence having the ACGC four base pair center sequence were observed in most of the engineered nucleases, while some were comparable to LOX 3-4x.109.

TABLE 124
Meganucleases Optimized for ACGC Center
Sequence (First Subunit - Lox3)

| | | I-CreI Position | | | | | | |
|---|---|---|---|---|---|---|---|---|
| | SEQ | 19 | 48 | 50 | 71 | 72 | 73 | 80 |
| Nuclease | ID | 19 | 48 | 50 | 71 | 72 | 73 | 80 |
| x.109 | 8 | A | K | Q | G | R | A | Q |
| m.1049 | 92 | G | H | Q | G | R | A | Q |
| m.1050 | 93 | A | Q | R | G | R | A | Q |
| m.1052 | 94 | A | K | R | G | R | A | Q |
| m.1068 | 95 | G | K | R | G | R | A | Q |
| m.1069 | 96 | A | K | R | R | R | A | Q |
| m.1074 | 97 | A | L | R | G | R | A | Q |
| m.1085 | 98 | G | K | R | G | R | A | Q |
| m.1093 | 99 | A | H | K | A | P | A | Q |
| m.1095 | 100 | A | K | S | R | R | A | Q |
| m.1098 | 101 | G | L | K | G | R | A | Q |
| m.1100 | 102 | G | L | K | G | R | A | Q |
| m.1101 | 103 | A | L | R | R | H | A | Q |
| m.1107 | 104 | A | H | R | R | R | A | Q |
| m.1109 | 105 | A | K | T | G | R | A | Q |
| m.1111 | 106 | A | L | R | G | R | A | Q |
| m.1113 | 107 | G | K | R | G | R | A | Q |
| m.1116 | 108 | A | K | R | G | R | A | Q |
| m.1117 | 109 | A | K | C | G | R | A | Q |
| m.1118 | 110 | G | A | R | G | R | A | Q |
| m.1123 | 111 | A | S | R | G | R | A | E |
| m.1125 | 112 | G | K | R | G | R | A | Q |
| m.1126 | 113 | G | K | R | G | R | A | Q |
| m.1127 | 114 | G | L | R | G | R | A | Q |
| m.1129 | 115 | A | K | R | G | R | A | Q |
| m.1131 | 116 | S | K | R | G | R | A | Q |
| m.1133 | 117 | A | K | C | G | R | A | Q |
| m.1137 | 118 | G | K | R | G | R | A | Q |

TABLE 125
Meganucleases Optimized for ACGC Center Sequence (Second Subunit - Lox4)

| | | I-CreI Position | | | | | | | | | |
|---|---|---|---|---|---|---|---|---|---|---|---|
| | SEQ | 19 | 48 | 50 | 71 | 72 | 73 | 74 | 80 | 87 | 139 |
| Nuclease | ID | 210 | 239 | 241 | 262 | 263 | 264 | 265 | 271 | 278 | 330 |
| x.109 | 8 | G | H | S | S | T | H | S | Q | F | K |
| m.1049 | 92 | A | K | E | G | R | T | A | Q | F | K |
| m.1050 | 93 | G | H | K | G | R | V | A | E | F | R |
| m.1052 | 94 | G | K | S | K | R | I | A | Q | F | N |
| m.1068 | 95 | A | L | K | G | R | V | T | E | F | H |
| m.1069 | 96 | G | K | E | G | R | V | A | E | F | R |
| m.1074 | 97 | G | H | K | G | R | I | A | E | F | H |
| m.1085 | 98 | A | K | E | S | R | V | A | Q | F | R |
| m.1093 | 99 | G | H | K | G | A | I | S | E | F | H |
| m.1095 | 100 | G | K | I | G | R | I | A | Q | F | R |
| m.1098 | 101 | A | L | N | G | R | I | S | Q | F | H |
| m.1100 | 102 | A | A | K | A | R | I | S | Q | L | H |
| m.1101 | 103 | G | S | K | G | T | V | S | Q | F | R |
| m.1107 | 104 | G | A | K | G | R | T | A | E | F | K |
| m.1109 | 105 | G | K | I | G | S | V | S | E | F | R |
| m.llll | 106 | G | K | N | G | R | V | A | E | F | H |
| m.1113 | 107 | A | K | V | G | H | T | A | Q | F | H |
| m.1116 | 108 | G | H | K | R | R | V | A | E | F | R |
| m.1117 | 109 | G | L | N | G | R | V | A | Q | F | R |
| m.1118 | 110 | A | K | I | G | R | C | A | E | F | H |
| m.1123 | 111 | G | H | K | G | R | I | T | Q | F | H |
| m.1125 | 112 | A | L | E | G | R | V | A | Q | F | K |
| m.1126 | 113 | A | K | K | G | S | I | S | Q | F | A |
| m.1127 | 114 | A | L | K | G | G | I | A | Q | F | R |
| m.1129 | 115 | G | N | S | G | R | I | S | Q | F | R |
| m.1131 | 116 | G | K | I | G | R | I | A | E | F | R |
| m.1133 | 117 | G | H | R | G | R | C | A | E | F | H |
| m.1137 | 118 | A | A | K | G | W | I | A | E | F | K |

TABLE 126
CHO iGFFP Assay ACGC Center Sequence Cleavage

| | SEQ ID | |
|---|---|---|
| Meganuclease | NO: | GFP % |
| LOX 3-4bs | — | 0.27 |
| CHO 23/24 | — | 10.12 |
| x.109 | 8 | 5.14 |
| m.1049 | 92 | 7.59 |
| m.1050 | 93 | 8.90 |
| m.1052 | 94 | 9.34 |
| m.1068 | 95 | 9.00 |
| m.1069 | 96 | 10.35 |
| m.1074 | 97 | 8.56 |
| m.1085 | 98 | 7.64 |
| m.1093 | 99 | 8.32 |
| m.1095 | 100 | 5.42 |
| m.1098 | 101 | 7.42 |
| m.1100 | 102 | 9.09 |
| m.1101 | 103 | 8.44 |
| m.1107 | 104 | 8.36 |
| m.1109 | 105 | 8.62 |
| m.1111 | 106 | 8.51 |
| m.1113 | 107 | 7.68 |
| m.1116 | 108 | 8.64 |
| m.1117 | 109 | 9.13 |
| m.1118 | 110 | 7.86 |
| m.1123 | 111 | 9.56 |
| m.1125 | 112 | 10.39 |
| m.1126 | 113 | 8.46 |
| m.1127 | 114 | 8.04 |
| m.1129 | 115 | 8.70 |
| m.1131 | 116 | 7.97 |
| m.1133 | 117 | 6.94 |
| m.1137 | 118 | 7.49 |

### Example 7

### Engineered Meganucleases Cleaving Recognition Sequences Containing an ACGG Four Base Pair Center Sequence

[1240] Novel engineered meganucleases derived from the LOX 3-4x.109 meganuclease were prepared by making amino acid substitutions at one or more positions in the first subunit and one or more positions in the second subunit. In addition, an R residue was inserted following position 264, which corresponds to position 73 of wild-type I-CreI. These engineered meganucleases were then evaluated for cleavage of the LOX 3-4 recognition sequence modified to have an ACGG center sequence (SEQ ID NO: 119) in the CHO reporter assay according to Example 1. The substitutions in each subunit are provided in Tables 127 and 128, respectively. The results of the CHO reporter assay are provided in Table 129.

[1241] Following the modifications shown below, substantial improvements in cleavage of the recognition sequence having the ACGG four base pair center sequence were observed.

TABLE 127
Meganucleases Optimized for ACGG Center
Sequence (First Subunit - Lox3)

| | | I-CreI Position | | | | |
|---|---|---|---|---|---|---|
| | SEQ | 50 | 54 | 72 | 73 | 80 |
| Nuclease | ID | 50 | 54 | 72 | 73 | 80 |
| x.109 | 8 | Q | F | R | A | Q |
| m.1876 | 121 | R | F | R | A | Q |
| m.1894 | 122 | K | L | R | A | Q |
| m.1898 | 123 | R | F | R | A | Q |
| m.1904 | 124 | R | F | R | A | Q |
| m.1910 | 125 | R | F | R | A | Q |
| m.1914 | 126 | R | F | R | A | Q |
| m.1930 | 127 | R | F | R | A | Q |
| m.1938 | 128 | R | F | R | A | Q |
| m.1941 | 129 | R | F | R | A | Q |
| m.1944 | 130 | R | F | R | A | Q |
| m.1946 | 131 | R | F | R | A | Q |
| m.1947 | 132 | R | F | R | A | Q |
| m.1950 | 133 | R | F | R | A | Q |
| m.1952 | 134 | R | F | R | A | Q |
| m.1960 | 135 | R | F | R | A | Q |

TABLE 128
Meganucleases Optimized for ACGG Center
Sequence (Second Subunit - Lox4)

| | | I-CreI Position | | | | | | | |
|---|---|---|---|---|---|---|---|---|---|
| | | 19 | 48 | 50 | 71 | 72 | 73 | X | 19 |
| | | Nuclease | | | | | | | |
| | SEQ | 210 | 239 | 241 | 262 | 263 | 264 | X | 271 |
| +1 AA* | ID | 210 | 239 | 241 | 262 | 263 | 264 | 265* | 272 |
| x.109 | 8 | G | H | S | S | T | H | | Q |
| m.1876 | 121 | A | K | R | D | G | R | R | Q |
| m.1894 | 122 | A | K | R | D | G | R | R | Q |
| m.1898 | 123 | A | K | R | D | G | R | R | Q |
| m.1904 | 124 | A | K | R | D | G | R | R | Q |
| m.1910 | 125 | A | K | R | D | G | R | R | Q |
| m.1914 | 126 | A | K | R | D | G | R | R | Q |
| m.1930 | 127 | A | K | R | D | G | R | R | Q |
| m.1938 | 128 | A | K | P | D | G | R | R | Q |
| m.1941 | 129 | A | K | R | D | G | R | R | Q |
| m.1944 | 130 | A | K | R | D | G | R | R | Q |
| m.1946 | 131 | A | K | R | D | G | R | R | Q |
| m.1947 | 132 | A | K | R | D | G | R | R | Q |
| m.1950 | 133 | A | K | R | D | G | R | R | Q |
| m.1952 | 134 | A | K | P | D | G | G | R | Q |
| m.1960 | 135 | A | K | R | D | G | R | R | Q |

*Refers to engineered meganucleases having an insertion following a position which corresponds to position 73 of I-CreI.

TABLE 129
CHO iGFFP Assay ACGG Center Sequence Cleavage

| | SEQ ID | |
|---|---|---|
| Meganuclease | NO: | GFP % |
| LOX 3-4bs | — | 0.7 |
| CHO 23/24 | — | 13.6 |
| x.109 | 8 | 0.5 |
| m.1876 | 121 | 9.6 |
| m.1894 | 122 | 6.0 |
| m.1898 | 123 | 9.2 |
| m.1904 | 124 | 6.1 |
| m.1910 | 125 | 9.3 |
| m.1914 | 126 | 9.5 |
| m.1930 | 127 | 9.1 |
| m.1938 | 128 | 9.4 |
| m.1941 | 129 | 10.1 |
| m.1944 | 130 | 8.3 |
| m.1946 | 131 | 10.8 |
| m.1947 | 132 | 10.5 |
| m.1950 | 133 | 9.3 |
| m.1952 | 134 | 6.8 |
| m.1960 | 135 | 8.5 |

### Example 8

### Engineered Meganucleases Cleaving Recognition Sequences Containing an ACGT Four Base Pair Center Sequence

[1242] Novel engineered meganucleases derived from the LOX 3-4x.109 meganuclease were prepared by making amino acid substitutions at one or more positions in the first subunit and one or more positions in the second subunit. These engineered meganucleases were then evaluated for cleavage of the LOX 3-4 recognition sequence modified to have an ACGT center sequence (SEQ ID NO: 136) in the CHO reporter assay according to Example 1. The substitutions in each subunit are provided in Tables 130 and 131, respectively. The results of the CHO reporter assay are provided in Table 132. Novel meganucleases which were modified to comprise the residues recited in the tables below continued to cleave the LOX 3-4 recognition sequence having an ACGT four base pair center sequence or were more active than the LOX 3-4x.109 meganuclease.

TABLE 130
Meganucleases Optimized for ACGT Center
Sequence (First Subunit - Lox3)

| | | I-CreI Position | | | | | | | |
|---|---|---|---|---|---|---|---|---|---|
| | SEQ | 19 | 48 | 50 | 71 | 72 | 73 | 80 | 139 |
| Nuclease | ID | 19 | 48 | 50 | 71 | 72 | 73 | 80 | 139 |
| x.109 | 8 | A | K | Q | G | R | A | Q | K |
| m.1145 | 138 | G | L | R | G | R | A | Q | K |
| m.1149 | 139 | A | K | R | G | R | A | Q | K |
| m.1152 | 140 | A | K | R | G | R | A | Q | K |
| m.1153 | 141 | A | K | C | G | R | A | Q | K |
| m.1157 | 142 | G | K | R | G | R | A | E | K |
| m.1158 | 143 | A | K | R | G | R | A | E | K |
| m.1176 | 144 | G | K | S | G | R | A | Q | K |
| m.1191 | 145 | G | K | S | G | R | A | Q | K |
| m.1198 | 146 | A | K | R | G | R | A | Q | K |
| m.1201 | 147 | G | L | R | G | R | A | Q | R |
| m.1205 | 148 | A | K | R | G | R | A | Q | K |
| m.1206 | 149 | G | K | C | G | R | A | Q | K |
| m.1208 | 150 | G | K | R | G | R | A | Q | K |
| m.1212 | 151 | A | S | R | G | R | A | Q | K |
| m.1218 | 152 | A | H | R | G | R | A | Q | K |
| m.1224 | 153 | G | K | V | G | R | A | Q | K |
| m.1225 | 154 | A | K | C | G | R | A | Q | K |
| m.1226 | 155 | A | K | R | G | R | A | Q | K |
| m.1227 | 156 | A | K | R | G | R | A | Q | K |

TABLE 131
Meganucleases Optimized for ACGT Center Sequence (Second Subunit - Lox4)

| | | I-CreI Position | | | | | | | | | |
|---|---|---|---|---|---|---|---|---|---|---|---|
| | SEQ | 19 | 48 | 50 | 71 | 72 | 73 | 74 | 80 | 85 | 139 |
| Nuclease | ID | 210 | 239 | 241 | 262 | 263 | 264 | 265 | 271 | 276 | 330 |
| x.109 | 8 | G | H | S | S | T | H | S | Q | H | K |
| m.1145 | 138 | A | K | C | P | R | C | S | Q | H | K |
| m.1149 | 139 | G | L | C | G | K | A | S | Q | H | K |
| m.1152 | 140 | G | S | Q | G | A | A | S | Q | H | K |
| m.1153 | 141 | G | S | E | G | K | A | A | Q | H | K |
| m.1157 | 142 | A | K | C | P | K | C | A | Q | H | K |
| m.1158 | 143 | G | S | C | G | K | A | S | Q | H | K |
| m.1176 | 144 | A | K | E | T | R | C | A | Q | H | K |
| m.1191 | 145 | A | K | C | A | K | C | A | Q | H | K |
| m.1198 | 146 | G | S | E | G | R | A | A | Q | H | K |
| m.1201 | 147 | A | K | E | G | R | A | A | Q | H | K |
| m.1205 | 148 | G | K | E | R | R | A | A | Q | H | R |
| m.1206 | 149 | A | S | E | G | K | C | T | Q | H | K |
| m.1208 | 150 | A | S | E | G | K | C | T | Q | H | K |
| m.1212 | 151 | G | L | E | G | R | C | A | Q | H | K |
| m.1218 | 152 | G | K | E | G | R | A | S | E | H | K |
| m.1224 | 153 | A | S | A | G | R | A | A | Q | Y | K |
| m.1225 | 154 | G | S | A | G | R | A | A | Q | H | K |
| m.1226 | 155 | G | K | E | N | R | C | S | Q | H | K |
| m.1227 | 156 | G | K | C | G | K | S | S | Q | H | K |

TABLE 132
CHO iGFFP Assay ACGT Center Sequence Cleavage

| | SEQ ID | |
|---|---|---|
| Meganuclease | NO: | GFP % |
| LOX 3-4bs | — | 0.35 |
| CHO 23/24 | — | 10.54 |
| x.109 | 8 | 8.34 |
| m.1145 | 138 | 8.70 |
| m.1149 | 139 | 8.91 |
| m.1152 | 140 | 7.91 |
| m.1153 | 141 | 10.28 |
| m.1157 | 142 | 7.22 |
| m.1158 | 143 | 9.19 |
| m.1176 | 144 | 7.70 |
| m.1191 | 145 | 8.00 |
| m.1198 | 146 | 8.30 |
| m.1201 | 147 | 7.98 |
| m.1205 | 148 | 7.68 |
| m.1206 | 149 | 9.84 |
| m.1208 | 150 | 7.57 |
| m.1212 | 151 | 7.31 |
| m.1218 | 152 | 8.48 |
| m.1224 | 153 | 7.84 |
| m.1225 | 154 | 10.64 |
| m.1226 | 155 | 8.02 |
| m.1227 | 156 | 8.44 |

### Example 9

### Engineered Meganucleases Cleaving Recognition Sequences Containing an ATAA Four Base Pair Center Sequence

[1243] Novel engineered meganucleases derived from the LOX 3-4x.109 meganuclease were prepared by making amino acid substitutions at one or more positions in the first subunit and one or more positions in the second subunit. These engineered meganucleases were then evaluated for cleavage of the LOX 3-4 recognition sequence modified to have an ATAA center sequence (SEQ ID NO: 157) in the CHO reporter assay according to Example 1. The substitutions in each subunit are provided in Tables 133 and 134, respectively. The results of the CHO reporter assay are provided in Table 135.

[1244] Following the modifications shown below, substantial improvements in cleavage of the recognition sequence having the ATAA four base pair center sequence were observed.

TABLE 133
Meganucleases Optimized for ATAA Center
Sequence (First Subunit - Lox3)

| | | I-CreI Position | | | | | | | | | |
|---|---|---|---|---|---|---|---|---|---|---|---|
| | SEQ | 19 | 48 | 50 | 71 | 72 | 73 | 74 | 80 | 100 | 139 |
| Nuclease | ID | 19 | 48 | 50 | 71 | 72 | 73 | 74 | 80 | 100 | 139 |
| x.109 | 8 | A | K | Q | G | R | A | S | Q | K | K |
| m.1232 | 159 | G | K | T | G | R | A | S | E | K | R |
| m.1235 | 160 | S | A | R | G | R | A | S | Q | K | R |
| m.1236 | 161 | A | H | T | G | R | A | S | Q | K | K |
| m.1237 | 162 | A | A | I | G | R | A | S | Q | K | K |
| m.1240 | 163 | A | S | R | G | R | A | S | E | K | R |
| m.1250 | 164 | A | H | R | G | A | A | S | Q | E | K |
| m.1253 | 165 | A | S | R | K | G | T | A | E | K | R |
| m.1255 | 166 | A | K | G | G | R | A | S | Q | K | K |
| m.1256 | 167 | G | K | K | S | G | A | S | Q | K | R |
| m.1260 | 168 | G | K | R | G | R | C | S | E | K | K |
| m.1261 | 169 | A | S | R | H | A | A | S | Q | K | R |
| m.1262 | 170 | A | K | D | G | R | A | S | Q | K | R |
| m.1268 | 171 | A | K | T | N | Q | A | A | Q | K | R |
| m.1269 | 172 | A | H | R | G | H | C | S | Q | K | R |
| m.1278 | 173 | A | K | C | G | L | C | S | E | K | K |
| m.1284 | 174 | G | A | C | G | R | A | S | E | K | K |
| m.1293 | 175 | G | K | V | G | A | C | S | E | K | R |
| m.1301 | 176 | A | K | C | G | S | A | S | E | K | R |
| m.1308 | 177 | A | S | R | H | R | C | S | E | K | R |
| m.1309 | 178 | S | K | K | G | R | A | S | Q | K | R |
| m.1311 | 179 | A | K | R | G | R | A | S | Q | K | K |
| m.1317 | 180 | A | L | R | G | R | A | S | Q | K | K |
| m.1319 | 181 | A | S | Q | G | R | A | S | Q | K | K |
| m.1322 | 182 | G | Q | R | G | R | A | S | Q | K | R |
| m.1300 | 183 | A | A | R | G | R | A | S | Q | K | R |

TABLE 134
Meganucleases Optimized for ATAA Center Sequence (Second Subunit - Lox4)

| | | I-CreI Position | | | | | | | | | | | | |
|---|---|---|---|---|---|---|---|---|---|---|---|---|---|---|
| | SEQ | 19 | 48 | 50 | 59 | 71 | 72 | 73 | 74 | 78 | 79 | 80 | 118 | 139 |
| Nuclease | ID | 210 | 239 | 241 | 250 | 262 | 263 | 264 | 265 | 269 | 270 | 271 | 309 | 330 |
| x.109 | 8 | G | H | S | V | S | T | H | S | L | S | Q | S | K |
| m.1232 | 159 | S | S | R | V | G | T | I | A | L | S | E | S | K |
| m.1235 | 160 | G | T | R | V | G | R | C | A | L | S | E | S | R |
| m.1236 | 161 | G | A | K | V | G | Q | V | A | L | S | Q | S | R |
| m.1237 | 162 | G | K | E | V | G | G | V | A | L | S | Q | S | K |
| m.1240 | 163 | G | K | E | V | K | A | I | A | L | S | Q | S | R |
| m.1250 | 164 | G | A | A | V | G | G | V | A | L | S | Q | S | R |
| m.1253 | 165 | G | S | K | V | G | R | I | A | L | S | Q | S | R |
| m.1255 | 166 | G | A | C | A | G | R | V | S | L | S | Q | S | R |
| m.1256 | 167 | A | N | K | V | G | R | I | A | L | S | E | S | R |
| m.1260 | 168 | A | S | T | V | G | Y | V | A | L | S | Q | S | R |
| m.1261 | 169 | G | S | R | V | G | R | I | A | L | S | E | S | R |
| m.1262 | 170 | G | K | T | V | S | G | V | S | L | S | Q | S | R |
| m.1268 | 171 | G | S | T | V | G | R | I | A | L | S | Q | S | R |
| m.1269 | 172 | G | T | R | V | G | G | I | S | L | S | E | S | R |
| m.1278 | 173 | G | S | K | V | G | R | V | T | L | S | Q | S | R |
| m.1284 | 174 | A | K | K | V | G | S | V | S | L | S | Q | S | R |
| m.1293 | 175 | S | S | K | V | G | N | V | S | L | S | Q | S | R |
| m.1301 | 176 | G | S | R | V | G | S | V | S | L | S | E | S | K |
| m.1308 | 177 | G | T | R | V | G | R | C | A | L | S | E | S | R |
| m.1309 | 178 | G | S | K | V | G | K | V | S | L | S | E | S | K |
| m.1311 | 179 | G | S | R | V | G | Q | V | S | L | S | Q | S | R |
| m.1317 | 180 | G | S | K | A | R | S | I | A | L | S | E | S | R |
| m.1319 | 181 | G | K | T | V | G | S | V | S | L | S | E | S | R |
| m.1322 | 182 | G | S | R | V | G | R | V | S | L | S | Q | S | K |
| m.1300 | 183 | A | S | K | V | G | Y | V | A | L | S | Q | F | R |

TABLE 135
CHO iGFFP Assay ATAA Center Sequence Cleavage

| | SEQ ID | |
|---|---|---|
| Meganuclease | NO: | GFP % |
| LOX 3-4bs | — | 0.59 |
| CHO 23/24 | — | 10.40 |
| x.109 | 8 | 1.11 |
| m.1232 | 159 | 6.82 |
| m.1235 | 160 | 6.54 |
| m.1236 | 161 | 9.28 |
| m.1237 | 162 | 8.13 |
| m.1240 | 163 | 7.02 |
| m.1250 | 164 | 6.44 |
| m.1253 | 165 | 6.87 |
| m.1255 | 166 | 7.23 |
| m.1256 | 167 | 7.22 |
| m.1260 | 168 | 6.96 |
| m.1261 | 169 | 7.84 |
| m.1262 | 170 | 6.45 |
| m.1268 | 171 | 7.44 |
| m.1269 | 172 | 8.64 |
| m.1278 | 173 | 6.55 |
| m.1284 | 174 | 6.81 |
| m.1293 | 175 | 8.00 |
| m.1301 | 176 | 7.37 |
| m.1308 | 177 | 6.76 |
| m.1309 | 178 | 6.34 |
| m.1311 | 179 | 6.36 |
| m.1317 | 180 | 8.30 |
| m.1319 | 181 | 6.30 |
| m.1322 | 182 | 6.92 |
| m.1300 | 183 | 7.57 |

### Example 10

### Engineered Meganucleases Cleaving Recognition Sequences Containing an ATAG Four Base Pair Center Sequence

[1245] Novel engineered meganucleases derived from the LOX 3-4x.109 meganuclease were prepared by making amino acid substitutions at one or more positions in the first subunit and one or more positions in the second subunit. These engineered meganucleases were then evaluated for cleavage of the LOX 3-4 recognition sequence modified to have an ATAG center sequence (SEQ ID NO: 184) in the CHO reporter assay according to Example 1. The substitutions in each subunit are provided in Tables 136 and 137, respectively. The results of the CHO reporter assay are provided in Table 138.

[1246] Following the modifications shown below, substantial improvements in cleavage of the recognition sequence having the ATAG four base pair center sequence were observed.

TABLE 136
Meganucleases Optimized for ATAG Center
Sequence (First Subunit - Lox3)

| | | I-CreI Position | | | | | | | |
|---|---|---|---|---|---|---|---|---|---|
| | | 19 | 48 | 50 | 71 | 72 | 73 | 80 | 139 |
| Nuclease | SEQ ID | 19 | 48 | 50 | 71 | 72 | 73 | 80 | 139 |
| x.109 | 8 | A | K | Q | G | R | A | Q | K |
| m.1329 | 186 | A | H | R | G | R | A | Q | K |
| m.1338 | 187 | G | K | R | G | R | A | Q | R |
| m.1343 | 188 | A | K | R | G | R | A | Q | K |
| m.1345 | 189 | A | K | R | G | G | A | Q | K |
| m.1347 | 190 | A | K | R | G | S | A | Q | K |
| m.1353 | 191 | A | K | R | G | R | A | Q | K |
| m.1361 | 192 | A | K | R | G | G | C | Q | R |
| m.1369 | 193 | A | K | R | R | A | C | Q | K |
| m.1391 | 194 | A | K | R | G | R | A | Q | K |
| m.1392 | 195 | A | H | R | G | R | A | Q | K |
| m.1394 | 196 | A | H | R | G | R | A | Q | K |
| m.1396 | 197 | A | K | R | G | P | A | Q | K |
| m.1405 | 198 | A | H | R | H | Q | A | Q | K |
| m.1415 | 199 | A | K | R | G | R | A | E | K |

TABLE 137
Meganucleases Optimized for ATAG Center Sequence (Second Subunit - Lox4)

| | | I-CreI Position | | | | | | | |
|---|---|---|---|---|---|---|---|---|---|
| | SEQ | 19 | 36 | 50 | 59 | 72 | 73 | 80 | 139 |
| Nuclease | ID | 210 | 227 | 241 | 250 | 263 | 264 | 271 | 330 |
| x.109 | 8 | G | K | S | V | T | H | Q | K |
| m.1329 | 186 | G | K | C | V | G | R | Q | K |
| m.1338 | 187 | A | K | C | V | G | R | Q | K |
| m.1343 | 188 | G | K | C | A | G | R | Q | R |
| m.1345 | 189 | G | K | C | V | G | R | Q | K |
| m.1347 | 190 | G | K | R | A | G | R | Q | R |
| m.1353 | 191 | G | R | C | A | S | R | Q | R |
| m.1361 | 192 | G | K | C | V | G | R | Q | R |
| m.1369 | 193 | G | K | C | V | G | R | Q | R |
| m.1391 | 194 | G | K | C | V | G | R | Q | R |
| m.1392 | 195 | G | K | C | A | G | R | Q | K |
| m.1394 | 196 | G | K | — | A | G | R | Q | K |
| m.1396 | 197 | G | K | C | V | G | R | Q | R |
| m.1405 | 198 | G | K | C | A | G | R | Q | R |
| m.1415 | 199 | G | K | C | A | G | R | Q | R |

TABLE 138
CHO iGFFP Assay ATAG Center Sequence Cleavage

| | SEQ ID | |
|---|---|---|
| Meganuclease | NO: | GFP % |
| LOX 3-4bs | — | 0.67 |
| CHO 23/24 | — | 10.22 |
| x.109 | 8 | 0.45 |
| m.1329 | 186 | 15.54 |
| m.1338 | 187 | 12.01 |
| m.1343 | 188 | 11.40 |
| m.1345 | 189 | 13.99 |
| m.1347 | 190 | 12.28 |
| m.1353 | 191 | 15.61 |
| m.1361 | 192 | 12.85 |
| m.1369 | 193 | 13.03 |
| m.1391 | 194 | 11.45 |
| m.1392 | 195 | 11.38 |
| m.1394 | 196 | 11.49 |
| m.1396 | 197 | 11.35 |
| m.1405 | 198 | 12.51 |
| m.1415 | 199 | 13.13 |

### Example 11

### Engineered Meganucleases Cleaving Recognition Sequences Containing an ATAT Four Base Pair Center Sequence

[1247] Novel engineered meganucleases derived from the LOX 3-4x.109 meganuclease were prepared by making amino acid substitutions at one or more positions in the first subunit and one or more positions in the second subunit. These engineered meganucleases were then evaluated for cleavage of the LOX 3-4 recognition sequence modified to have an ATAT center sequence (SEQ ID NO: 200) in the CHO reporter assay according to Example 1. The substitutions in each subunit are provided in Tables 139 and 140, respectively. The results of the CHO reporter assay are provided in Table 141.

[1248] Following the modifications shown below, substantial improvements in cleavage of the recognition sequence having the ATAT four base pair center sequence were observed.

TABLE 139
Meganucleases Optimized for ATAT Center
Sequence (First Subunit - Lox3)

| | | I-CreI Position | | | | | | | |
|---|---|---|---|---|---|---|---|---|---|
| | SEQ | 19 | 48 | 50 | 71 | 72 | 73 | 80 | 139 |
| Nuclease | ID | 19 | 48 | 50 | 71 | 72 | 73 | 80 | 139 |
| x.109 | 8 | A | K | Q | G | R | A | Q | K |
| m.2244 | 202 | A | H | N | G | R | A | Q | R |
| m.2248 | 203 | G | H | C | G | R | A | Q | R |
| m.2254 | 204 | A | C | R | G | R | A | Q | R |
| m.2263 | 205 | A | A | R | G | R | A | Q | R |
| m.2273 | 206 | A | K | R | G | R | A | Q | R |
| m.2274 | 207 | A | A | K | G | R | A | Q | R |
| m.2313 | 208 | A | A | K | G | R | A | Q | R |
| m.2316 | 209 | A | K | C | G | R | A | Q | K |
| m.2327 | 210 | A | K | C | G | R | A | Q | R |
| m.2318 | 211 | A | K | S | G | R | A | E | R |
| m.2319 | 212 | A | S | R | H | A | A | Q | R |
| m.2320 | 213 | A | K | T | I | N | C | Q | R |
| m.2322 | 214 | — | D | K | G | R | A | Q | R |
| m.2324 | 215 | A | K | R | G | Q | S | Q | K |
| m.2326 | 216 | A | K | V | G | R | A | Q | S |
| m.2329 | 217 | A | T | R | G | R | A | Q | R |
| m.2330 | 218 | A | K | K | G | R | A | E | R |
| m.2258 | 219 | A | K | V | G | A | A | Q | R |

TABLE 140
Meganucleases Optimized for ATAT Center Sequence (Second Subunit - Lox4)

| | | I-CreI Position | | | | | | | | | |
|---|---|---|---|---|---|---|---|---|---|---|---|
| | Seq | 19 | 48 | 50 | 59 | 71 | 72 | 73 | 74 | 80 | 139 |
| Nuclease | ID | 210 | 239 | 241 | 250 | 262 | 263 | 264 | 265 | 271 | 330 |
| x.109 | 8 | G | H | S | V | S | T | H | S | Q | K |
| m.2244 | 202 | G | K | C | V | K | T | C | C | Q | K |
| m.2248 | 203 | A | H | K | V | K | A | C | C | E | R |
| m.2254 | 204 | G | A | C | V | K | R | C | A | Q | R |
| m.2263 | 205 | G | H | S | V | K | S | A | S | Q | R |
| m.2273 | 206 | G | H | R | V | E | R | C | C | Q | R |
| m.2274 | 207 | G | H | K | V | I | K | C | C | Q | R |
| m.2313 | 208 | G | A | K | V | G | K | C | A | Q | P |
| m.2316 | 209 | G | K | C | V | K | A | C | A | E | R |
| m.2327 | 210 | G | H | Q | V | R | K | C | C | Q | N |
| m.2318 | 211 | G | H | K | V | E | G | C | C | Q | R |
| m.2319 | 212 | G | A | R | V | R | R | C | C | E | R |
| m.2320 | 213 | G | S | N | V | R | G | S | C | Q | K |
| m.2322 | 214 | G | S | K | V | R | G | G | S | Q | K |
| m.2324 | 215 | G | S | S | V | G | R | C | C | Q | K |
| m.2326 | 216 | G | R | C | A | K | T | C | C | K | N |
| m.2329 | 217 | G | T | N | V | G | G | C | C | Q | R |
| m.2330 | 218 | G | A | R | V | R | N | C | C | Q | R |
| m.2258* | 219 | — | — | — | — | — | — | — | — | — | — |

*Sequencing of the second subunit was incomplete for the m.2258 meganuclease.

TABLE 141
CHO iGFFP Assay ATAT Center Sequence Cleavage

| | SEQ ID | |
|---|---|---|
| Meganuclease | NO: | GFP % |
| LOX 3-4 bs | | 0.50 |
| CHO 23-24 | | 11.80 |
| x.109 | 8 | 12.2 |
| m.2244 | 202 | 12.9 |
| m.2248 | 203 | 13.8 |
| m.2254 | 204 | 10.1 |
| m.2263 | 205 | 10.1 |
| m.2273 | 206 | 8.4 |
| m.2274 | 207 | 10.4 |
| m.2313 | 208 | 13.1 |
| m.2316 | 209 | 12.1 |
| m.2327 | 210 | 11.8 |
| m.2318 | 211 | 9.5 |
| m.2319 | 212 | 9.3 |
| m.2320 | 213 | 12.1 |
| m.2322 | 214 | 11.4 |
| m.2324 | 215 | 11.8 |
| m.2326 | 216 | 11.5 |
| m.2329 | 217 | 14.9 |
| m.2330 | 218 | 13.9 |
| m.2258 | 219 | 11.0 |

### Example 12

### Engineered Meganucleases Cleaving Recognition Sequences Containing an ATGA Four Base Pair Center Sequence

[1249] Novel engineered meganucleases derived from the LOX 3-4x.109 meganuclease were prepared by making amino acid substitutions at one or more positions in the first subunit and one or more positions in the second subunit. These engineered meganucleases were then evaluated for cleavage of the LOX 3-4 recognition sequence modified to have an ATGA center sequence (SEQ ID NO: 220) in the CHO reporter assay according to Example 1. The substitutions in each subunit are provided in Tables 142 and 143, respectively. The results of the CHO reporter assay are provided in Table 144.

[1250] Following the modifications shown below, substantial improvements in cleavage of the recognition sequence having the ATGA four base pair center sequence were observed.

TABLE 142
Meganucleases Optimized for ATGA Center
Sequence (First Subunit - Lox3)

| | | I-CreI Position | | | | | | | | |
|---|---|---|---|---|---|---|---|---|---|---|
| | SEQ | 19 | 48 | 50 | 72 | 73 | 80 | 87 | 92 | 139 |
| Nuclease | ID | 19 | 48 | 50 | 72 | 73 | 80 | 87 | 92 | 139 |
| x.109 | 8 | A | K | Q | R | A | Q | F | Q | K |
| m.1417 | 222 | A | A | R | T | A | Q | F | R | K |
| m.1421 | 223 | A | K | T | R | A | Q | F | Q | K |
| m.1432 | 224 | G | K | R | S | A | E | F | Q | K |
| m.1436 | 225 | S | K | E | R | A | Q | F | Q | K |
| m.1437 | 226 | G | K | S | R | A | E | F | Q | K |
| m.1441 | 227 | A | K | C | R | A | Q | F | Q | K |
| m.1450 | 228 | A | K | T | R | A | E | F | Q | K |
| m.1451 | 229 | A | H | R | A | A | E | F | Q | R |
| m.1453 | 230 | A | K | T | T | A | E | F | Q | R |
| m.1468 | 231 | G | L | R | R | A | E | F | Q | K |
| m.1469 | 232 | G | K | R | R | A | Q | F | Q | K |
| m.1477 | 233 | A | L | R | R | A | Q | F | Q | K |
| m.1478 | 234 | A | K | R | R | A | Q | F | Q | K |
| m.1485 | 235 | G | A | R | R | A | E | F | Q | R |
| m.1486 | 236 | A | K | T | T | A | E | F | Q | R |
| m.1488 | 237 | A | K | V | R | A | E | F | Q | K |
| m.1491 | 238 | A | K | R | R | A | Q | F | Q | K |
| m.1500 | 239 | A | K | R | S | S | Q | F | Q | R |
| m.1501 | 240 | A | K | T | S | A | E | F | Q | K |
| m.1502 | 241 | A | L | R | R | A | Q | E | Q | K |
| m.1505 | 242 | A | K | S | R | A | Q | F | Q | K |
| m.1506 | 243 | A | K | T | K | A | E | F | Q | R |

TABLE 143
Meganucleases Optimized for ATGA Center Sequence (Second Subunit - Lox4)

| | | I-CreI Position | | | | | | | | |
|---|---|---|---|---|---|---|---|---|---|---|
| | SEQ | 19 | 48 | 50 | 59 | 72 | 73 | 74 | 80 | 139 |
| Nuclease | ID | 210 | 239 | 241 | 250 | 263 | 264 | 265 | 271 | 330 |
| x.109 | 8 | G | H | S | V | T | H | S | Q | K |
| m.1417 | 222 | G | K | S | V | R | I | S | E | K |
| m.1421 | 223 | G | R | I | A | H | I | A | Q | K |
| m.1432 | 224 | A | K | S | V | R | I | S | E | K |
| m.1436 | 225 | G | A | R | V | R | I | S | Q | R |
| m.1437 | 226 | S | K | R | V | R | I | A | Q | K |
| m.1441 | 227 | G | K | I | V | R | I | S | E | R |
| m.1450 | 228 | G | K | C | V | R | V | A | E | R |
| m.1451 | 229 | G | K | S | A | H | I | S | E | K |
| m.1453 | 230 | G | K | I | V | R | I | A | Q | R |
| m.1468 | 231 | A | K | A | V | R | V | S | Q | R |
| m.1469 | 232 | A | K | S | V | H | V | S | E | R |
| m.1477 | 233 | G | A | R | V | R | V | A | E | K |
| m.1478 | 234 | G | K | C | V | H | I | S | E | K |
| m.1485 | 235 | A | K | C | V | R | V | S | Q | K |
| m.1486 | 236 | G | K | S | V | R | I | S | E | R |
| m.1488 | 237 | G | K | Q | V | H | I | A | Q | R |
| m.1491 | 238 | G | K | C | V | R | I | T | Q | R |
| m.1500 | 239 | G | S | R | V | H | V | S | Q | K |
| m.1501 | 240 | G | K | S | V | R | V | A | E | K |
| m.1502 | 241 | G | K | S | V | R | V | A | E | K |
| m.1505 | 242 | G | H | C | V | R | V | S | Q | R |
| m.1506 | 243 | G | K | I | A | R | I | S | E | R |

TABLE 144
CHO iGFFP Assay ATGA Center Sequence Cleavage

| | SEQ ID | |
|---|---|---|
| Meganuclease | NO: | GFP % |
| LOX 3-4bs | — | 0.30 |
| CHO 23/24 | — | 10.15 |
| x.109 | 8 | 0.32 |
| m.1417 | 222 | 5.89 |
| m.1421 | 223 | 8.37 |
| m.1432 | 224 | 5.97 |
| m.1436 | 225 | 6.18 |
| m.1437 | 226 | 6.33 |
| m.1441 | 227 | 6.83 |
| m.1450 | 228 | 6.59 |
| m.1451 | 229 | 6.13 |
| m.1453 | 230 | 6.96 |
| m.1468 | 231 | 6.40 |
| m.1469 | 232 | 6.60 |
| m.1477 | 233 | 6.45 |
| m.1478 | 234 | 6.46 |
| m.1485 | 235 | 6.03 |
| m.1486 | 236 | 9.23 |
| m.1488 | 237 | 7.40 |
| m.1491 | 238 | 6.43 |
| m.1500 | 239 | 3.60 |
| m.1501 | 240 | 7.35 |
| m.1502 | 241 | 6.26 |
| m.1505 | 242 | 6.24 |
| m.1506 | 243 | 8.20 |

### Example 13

### Engineered Meganucleases Cleaving Recognition Sequences Containing an ATGG Four Base Pair Center Sequence

[1251] Novel engineered meganucleases derived from the LOX 3-4x.109 meganuclease were prepared by making amino acid substitutions at one or more positions in the first subunit and one or more positions in the second subunit. In addition, an engineered meganuclease was generated that inserted an additional R residue following position 264, which corresponds to position 73 of wild-type I-CreI. These engineered meganucleases were then evaluated for cleavage of the LOX 3-4 recognition sequence modified to have an ATGG center sequence (SEQ ID NO: 244) in the CHO reporter assay according to Example 1. The substitutions in each subunit are provided in Tables 145 and 146, respectively. The results of the CHO reporter assay are provided in Table 147.

[1252] Following the modifications shown below, substantial improvements in cleavage of the recognition sequence having the ATGG four base pair center sequence were observed.

TABLE 145
Meganucleases Optimized for ATGG Center
Sequence (First Subunit - Lox3)

| | | I-CreI Position | | | | | | | | |
|---|---|---|---|---|---|---|---|---|---|---|
| | SEQ | 19 | 50 | 71 | 72 | 74 | 74 | 80 | 82 | 139 |
| Nuclease | ID | 19 | 50 | 71 | 72 | 73 | 74 | 80 | 82 | 139 |
| x.109 | 8 | A | Q | G | R | A | S | Q | K | K |
| m.1508 | 246 | G | R | G | P | A | S | E | E | R |
| m.1515 | 247 | A | R | S | G | C | C | Q | K | K |

TABLE 146
Meganucleases Optimized for ATGG Center Sequence (Second Subunit - Lox4)

| | | I-CreI Position | | | | | | | | |
|---|---|---|---|---|---|---|---|---|---|---|
| | | 19 | 48 | 50 | 71 | 72 | 73 | X | 77 | 80 |
| | | Nuclease | | | | | | | | |
| | SEQ | 210 | 239 | 241 | 262 | 263 | 264 | X | 268 | 271 |
| +1 AA* | ID | 210 | 239 | 241 | 262 | 263 | 264 | 265* | 269 | 272 |
| x.109 | 8 | G | H | S | S | T | H | | T | Q |
| m.1508 | 246 | A | K | R | D | G | R | R | N | Q |
| m.1515 | 247 | G | K | R | G | G | R | | N | R |

*Refers to engineered meganucleases having an insertion following a position which corresponds to position 73 of I-CreI.

TABLE 147
CHO iGFFP Assay ACAG Center Sequence Cleavage

| | SEQ ID | |
|---|---|---|
| Meganuclease | NO: | GFP % |
| LOX 3-4bs | — | 0.18 |
| CHO 23/24 | — | 12.43 |
| x.109 | 8 | 0.35 |
| m.1508 | 246 | 11.77 |
| m.1515 | 247 | 8.37 |

### Example 14

### Engineered Meganucleases Cleaving Recognition Sequences Containing an GCAA Four Base Pair Center Sequence

[1253] Novel engineered meganucleases derived from the LOX 3-4x.109 meganuclease were prepared by making amino acid substitutions at one or more positions in the first subunit and one or more positions in the second subunit. These engineered meganucleases were then evaluated for cleavage of the LOX 3-4 recognition sequence modified to have a GCAA center sequence (SEQ ID NO: 267) in the CHO reporter assay according to Example 1. The substitutions in each subunit are provided in Tables 148 and 149, respectively. The results of the CHO reporter assay are provided in Table 150.

[1254] Following the modifications shown below, substantial improvements in cleavage of the recognition sequence having the GCAA four base pair center sequence were observed.

TABLE 148
Meganucleases Optimized for GCAA Center
Sequence (First Subunit - Lox3)

| | | I-CreI Position | | | | | | | | |
|---|---|---|---|---|---|---|---|---|---|---|
| | SEQ | 19 | 48 | 50 | 71 | 72 | 73 | 74 | 80 | 139 |
| Nuclease | ID | 19 | 48 | 50 | 71 | 72 | 73 | 74 | 80 | 139 |
| x.109 | 8 | A | K | Q | G | R | A | S | Q | K |
| m.1784 | 269 | A | K | R | G | P | T | S | E | K |
| m.1785 | 270 | A | K | R | N | S | T | S | Q | K |
| m.1787 | 271 | A | K | R | T | N | T | S | E | K |
| m.1789 | 272 | A | K | C | R | Q | V | S | E | K |
| m.1798 | 273 | G | K | R | S | G | V | C | Q | K |
| m.1805 | 274 | G | K | K | R | G | V | S | Q | K |
| m.1809 | 275 | A | K | R | G | A | T | S | E | K |
| m.1812 | 276 | S | K | R | R | N | V | S | E | K |
| m.1814 | 277 | A | K | T | R | G | V | A | Q | K |
| m.1820 | 278 | A | K | R | G | A | T | S | E | K |
| m.1827 | 279 | — | K | R | S | T | V | S | E | K |
| m.1836 | 280 | A | K | R | S | G | T | S | Q | R |
| m.1837 | 281 | A | K | R | S | G | T | S | Q | K |
| m.1838 | 282 | G | K | C | R | M | V | S | Q | K |
| m.1846 | 283 | G | K | L | R | M | V | S | Q | K |
| m.1853 | 284 | G | K | R | H | A | T | S | Q | K |
| m.1854 | 285 | A | H | R | T | R | V | S | E | K |
| m.1858 | 286 | G | K | R | R | V | T | S | E | K |
| m.1862 | 287 | A | K | R | S | S | T | S | E | K |
| m.1868 | 288 | A | K | R | G | P | T | S | Q | K |
| m.1870 | 289 | G | K | R | T | N | V | S | E | K |
| m.1873 | 290 | S | K | R | R | N | T | S | Q | K |
| m.1875 | 291 | G | K | R | R | G | V | S | Q | K |

TABLE 149
Meganucleases Optimized for GCAA Center Sequence (Second Subunit - Lox4)

| | | I-CreI Position | | | | | | | | | |
|---|---|---|---|---|---|---|---|---|---|---|---|
| | SEQ | 19 | 31 | 48 | 50 | 71 | 72 | 73 | 74 | 80 | 139 |
| Nuclease | ID | 210 | 222 | 239 | 241 | 262 | 263 | 264 | 265 | 271 | 330 |
| x.109 | 8 | G | Q | H | S | S | T | H | S | Q | K |
| m.1784 | 269 | G | Q | S | R | G | G | C | A | Q | R |
| m.1785 | 270 | G | Q | S | C | G | S | V | S | Q | R |
| m.1787 | 271 | G | P | A | R | G | A | C | A | E | K |
| m.1789 | 272 | G | Q | K | C | G | T | C | S | E | R |
| m.1798 | 273 | A | Q | S | R | G | E | V | S | E | R |
| m.1805 | 274 | A | Q | A | R | R | N | I | A | Q | R |
| m.1809 | 275 | G | Q | S | T | G | S | V | S | Q | R |
| m.1812 | 276 | G | Q | A | R | G | G | V | A | Q | R |
| m.1814 | 277 | G | Q | K | K | G | G | I | S | E | R |
| m.1820 | 278 | G | Q | S | R | G | G | V | A | Q | R |
| m.1827 | 279 | G | Q | K | E | G | K | I | T | Q | R |
| m.1836 | 280 | G | Q | S | R | G | H | I | S | E | K |
| m.1837 | 281 | G | Q | K | C | A | H | V | S | Q | R |
| m.1838 | 282 | A | Q | T | K | G | R | V | S | Q | K |
| m.1846 | 283 | A | Q | S | R | G | R | I | S | E | K |
| m.1853 | 284 | A | Q | S | R | G | C | C | S | E | K |
| m.1854 | 285 | G | Q | T | K | G | K | V | A | Q | K |
| m.1858 | 286 | A | Q | S | K | G | S | I | S | Q | K |
| m.1862 | 287 | G | Q | S | R | G | Y | V | A | Q | K |
| m.1868 | 288 | G | Q | K | C | G | R | I | A | E | R |
| m.1870 | 289 | A | Q | S | R | G | R | I | A | E | R |
| m.1873 | 290 | G | Q | T | R | G | K | I | A | E | K |
| m.1875 | 291 | A | Q | K | C | H | K | I | A | E | R |

TABLE 150
CHO iGFFP Assay GCAA Center Sequence Cleavage

| | SEQ ID | |
|---|---|---|
| Meganuclease | NO: | GFP % |
| LOX 3-4bs | — | 0.72 |
| CHO 23/24 | — | 13.78 |
| x.109 | 8 | 0.52 |
| m.1784 | 269 | 6.19 |
| m.1785 | 270 | 5.02 |
| m.1787 | 271 | 5.33 |
| m.1789 | 272 | 8.90 |
| m.1798 | 273 | 5.25 |
| m.1805 | 274 | 6.65 |
| m.1809 | 275 | 4.83 |
| m.1812 | 276 | 5.13 |
| m.1814 | 277 | 7.38 |
| m.1820 | 278 | 5.88 |
| m.1827 | 279 | 5.10 |
| m.1836 | 280 | 6.29 |
| m.1837 | 281 | 6.07 |
| m.1838 | 282 | 4.75 |
| m.1846 | 283 | 5.44 |
| m.1853 | 284 | 4.75 |
| m.1854 | 285 | 7.67 |
| m.1858 | 286 | 4.75 |
| m.1862 | 287 | 5.44 |
| m.1868 | 288 | 7.56 |
| m.1870 | 289 | 6.67 |
| m.1873 | 290 | 4.77 |
| m.1875 | 291 | 8.14 |

### Example 15

### Engineered Meganucleases Cleaving Recognition Sequences Containing an GCAT Four Base Pair Center Sequence

[1255] Novel engineered meganucleases derived from the LOX 3-4x.109 meganuclease were prepared by making amino acid substitutions at one or more positions in the first subunit and one or more positions in the second subunit. These engineered meganucleases were then evaluated for cleavage of the LOX 3-4 recognition sequence modified to have a GCAT center sequence (SEQ ID NO: 292) in the CHO reporter assay according to Example 1. The substitutions in each subunit are provided in Tables 151 and 152, respectively. The results of the CHO reporter assay are provided in Table 153. Novel meganucleases which were modified to comprise the residues recited in the tables below continued to cleave the LOX 3-4 recognition sequence having a GCAT four base pair center sequence.

TABLE 151
Meganucleases Optimized for GCAT Center
Sequence (First Subunit - Lox3)

| | | I-CreI Position | | | | | | | | | |
|---|---|---|---|---|---|---|---|---|---|---|---|
| | SEQ | 19 | 48 | 50 | 71 | 72 | 73 | 74 | 80 | 139 | 143 |
| Nuclease | ID | 19 | 48 | 50 | 71 | 72 | 73 | 74 | 80 | 139 | 143 |
| x.109 | 8 | A | K | Q | G | R | A | S | Q | K | T |
| m.1600 | 294 | A | K | V | A | T | T | S | E | K | T |
| m.1601 | 295 | A | K | V | H | G | V | S | Q | K | T |
| m.1605 | 296 | A | K | R | H | S | T | S | Q | H | T |
| m.1606 | 297 | G | K | R | R | Q | T | S | Q | K | T |
| m.1623 | 298 | A | A | R | T | R | T | S | E | K | T |
| m.1660 | 299 | A | K | R | H | Q | T | S | Q | K | I |
| m.1661 | 300 | A | K | R | R | T | T | S | Q | K | T |
| m.1665 | 301 | A | H | R | R | R | V | S | Q | K | T |
| m.1667 | 302 | A | K | R | G | T | V | S | E | K | T |
| m.1669 | 303 | A | K | K | N | G | T | A | Q | K | T |
| m.1672 | 304 | A | H | R | S | R | T | S | Q | K | T |
| m.1674 | 305 | A | K | R | G | R | T | S | Q | K | T |
| m.1676 | 306 | A | K | S | R | N | C | S | Q | R | T |
| m.1677 | 307 | G | H | R | N | G | T | S | E | K | T |
| m.1679 | 308 | A | K | R | R | N | T | S | Q | K | T |
| m.1684 | 309 | G | R | R | T | G | V | S | Q | K | T |
| m.1685 | 310 | A | K | R | H | A | T | S | Q | K | T |
| m.1687 | 311 | G | K | R | R | G | V | S | E | K | T |
| m.1689 | 312 | A | K | R | A | A | T | S | Q | K | T |
| m.1691 | 313 | G | K | R | A | S | T | S | E | K | T |

TABLE 152
Meganucleases Optimized for GCAT Center Sequence (Second Subunit - Lox4)

| | | I-CreI Position | | | | | | | | | |
|---|---|---|---|---|---|---|---|---|---|---|---|
| | SEQ | 19 | 48 | 50 | 71 | 72 | 73 | 74 | 80 | 125 | 139 |
| Nuclease | ID | 210 | 239 | 241 | 262 | 263 | 264 | 265 | 271 | 316 | 330 |
| x.109 | 8 | G | H | S | S | T | H | S | Q | V | K |
| m.1600 | 294 | G | H | R | K | A | C | S | Q | V | R |
| m.1601 | 295 | G | A | R | R | G | G | C | E | V | K |
| m.1605 | 296 | G | K | S | A | N | C | C | Q | V | R |
| m.1606 | 297 | S | A | R | K | T | G | C | E | V | K |
| m.1623 | 298 | G | H | K | K | G | S | S | Q | V | K |
| m.1660 | 299 | G | A | R | K | T | C | A | E | A | K |
| m.1661 | 300 | G | A | R | G | S | G | S | E | V | R |
| m.1665 | 301 | G | T | R | K | G | A | S | E | V | K |
| m.1667 | 302 | G | T | Q | G | R | S | C | E | V | K |
| m.1669 | 303 | G | A | H | R | R | C | A | E | V | K |
| m.1672 | 304 | G | L | R | G | H | S | C | E | V | K |
| m.1674 | 305 | G | K | K | T | Q | C | C | E | V | K |
| m.1676 | 306 | G | H | K | R | R | S | C | E | V | K |
| m.1677 | 307 | A | L | K | R | A | C | C | E | V | K |
| m.1679 | 308 | G | I | K | G | N | S | C | E | V | K |
| m.1684 | 309 | S | A | K | K | A | C | C | E | V | K |
| m.1685 | 310 | G | K | V | R | K | C | S | Q | V | K |
| m.1687 | 311 | A | A | S | H | G | A | C | Q | V | H |
| m.1689 | 312 | G | A | H | G | T | S | A | Q | V | K |
| m.1691 | 313 | A | H | K | Y | R | C | C | E | V | K |

TABLE 153
CHO iGFFP Assay GCAT Center Sequence Cleavage

| | SEQ ID | |
|---|---|---|
| Meganuclease | NO: | GFP % |
| LOX 3-4bs | — | 0.26 |
| CHO 23/24 | — | 14.21 |
| x.109 | 8 | 9.25 |
| m.1600 | 294 | 9.68 |
| m.1601 | 295 | 10.90 |
| m.1605 | 296 | 8.70 |
| m.1606 | 297 | 8.33 |
| m.1623 | 298 | 8.18 |
| m.1660 | 299 | 8.70 |
| m.1661 | 300 | 9.13 |
| m.1665 | 301 | 9.08 |
| m.1667 | 302 | 8.16 |
| m.1669 | 303 | 9.90 |
| m.1672 | 304 | 8.32 |
| m.1674 | 305 | 8.32 |
| m.1676 | 306 | 8.29 |
| m.1677 | 307 | 8.80 |
| m.1679 | 308 | 10.78 |
| m.1684 | 309 | 8.01 |
| m.1685 | 310 | 10.10 |
| m.1687 | 311 | 10.88 |
| m.1689 | 312 | 11.18 |
| m.1691 | 313 | 9.24 |

### Example 16

### Engineered Meganucleases Cleaving Recognition Sequences Containing an GCGA Four Base Pair Center Sequence

[1256] Novel engineered meganucleases derived from the LOX 3-4x.109 meganuclease were prepared by making amino acid substitutions at one or more positions in the first subunit and one or more positions in the second subunit. These engineered meganucleases were then evaluated for cleavage of the LOX 3-4 recognition sequence modified to have a GCGA center sequence (SEQ ID NO: 314) in the CHO reporter assay according to Example 1. The substitutions in each subunit are provided in Tables 154 and 155, respectively. The results of the CHO reporter assay are provided in Table 156.

[1257] Following the modifications shown below, substantial improvements in cleavage of the recognition sequence having the GCGA four base pair center sequence were observed.

TABLE 154
Meganucleases Optimized for GCGA Center
Sequence (First Subunit - Lox3)

| | | I-CreI Position | | | | | | |
|---|---|---|---|---|---|---|---|---|
| | SEQ | 19 | 50 | 71 | 72 | 73 | 74 | 80 |
| Nuclease | ID | 19 | 50 | 71 | 72 | 73 | 74 | 80 |
| x.109 | 8 | A | Q | G | R | A | S | Q |
| m.1694 | 316 | G | K | R | N | V | S | E |
| m.1745 | 317 | A | R | S | G | T | S | Q |
| m.1752 | 318 | S | R | S | G | T | S | Q |
| m.1753 | 319 | G | R | R | A | V | S | E |
| m.1765 | 320 | S | K | A | G | I | A | E |
| m.1770 | 321 | G | R | R | G | V | S | E |
| m.1774 | 322 | G | R | G | G | V | S | Q |
| m.1780 | 323 | A | R | S | G | V | S | E |
| m.1781 | 324 | A | R | N | R | V | S | Q |
| m.1782 | 325 | G | R | R | Q | V | S | E |

TABLE 155
Meganucleases Optimized for GCGA Center Sequence (Second Subunit - Lox4)

| | | I-CreI Position | | | | | | | |
|---|---|---|---|---|---|---|---|---|---|
| | SEQ | 19 | 48 | 50 | 72 | 73 | 74 | 80 | 139 |
| Nuclease | ID | 210 | 239 | 241 | 263 | 264 | 265 | 271 | 330 |
| x.109 | 8 | G | H | S | T | H | S | Q | K |
| m.1694 | 316 | S | K | C | R | V | S | Q | R |
| m.1745 | 317 | G | T | R | R | I | S | Q | R |
| m.1752 | 318 | G | S | R | R | I | S | E | R |
| m.1753 | 319 | A | A | R | R | I | S | Q | R |
| m.1765 | 320 | G | S | R | R | I | S | Q | R |
| m.1770 | 321 | G | Q | R | R | I | S | Q | R |
| m.1774 | 322 | G | A | R | R | I | A | Q | R |
| m.1780 | 323 | G | Q | R | R | I | S | Q | R |
| m.1781 | 324 | G | S | R | R | I | S | E | R |
| m.1782 | 325 | A | A | R | R | I | S | Q | R |

TABLE 156
CHO iGFFP Assay GCGA Center Sequence Cleavage

| | SEQ ID | |
|---|---|---|
| Meganuclease | NO: | GFP % |
| LOX 3-4bs | — | 0.73 |
| CHO 23/24 | — | 14.45 |
| x.109 | 8 | 0.48 |
| m.1694 | 316 | 4.93 |
| m.1745 | 317 | 5.13 |
| m.1752 | 318 | 4.66 |
| m.1753 | 319 | 4.75 |
| m.1765 | 320 | 4.64 |
| m.1770 | 321 | 4.69 |
| m.1774 | 322 | 4.58 |
| m.1780 | 323 | 6.53 |
| m.1781 | 324 | 6.58 |
| m.1782 | 325 | 5.45 |

### Example 17

### Engineered Meganucleases Cleaving Recognition Sequences Containing an GTAA Four Base Pair Center Sequence

[1258] Novel engineered meganucleases derived from the LOX 3-4x.109 meganuclease were prepared by making amino acid substitutions at one or more positions in the first subunit. These engineered meganucleases were then evaluated for cleavage of the LOX 3-4 recognition sequence modified to have a GTAA center sequence (SEQ ID NO: 358) in the CHO reporter assay according to Example 1. The substitutions in the first subunit are provided in Table 157. The results of the CHO reporter assay are provided in Table 158. Novel meganucleases which were modified to comprise the residues recited in the tables below were capable of cleaving the LOX 3-4 recognition sequence having a GTAA four base pair center sequence.

TABLE 157
Meganucleases Optimized for GTAA Center
Sequence (First Subunit - Lox3)

| | | I-CreI Position | | | | | | | | |
|---|---|---|---|---|---|---|---|---|---|---|
| | SEQ | 19 | 48 | 50 | 71 | 72 | 73 | 74 | 80 | 139 |
| Nuclease | ID | 19 | 48 | 50 | 71 | 72 | 73 | 74 | 80 | 139 |
| M.1 | 360 | A | K | R | S | Q | V | T | Q | R |
| M.2 | 361 | A | A | R | T | N | V | S | Q | R |
| M.3 | 362 | S | K | A | A | S | V | S | Q | R |
| M.4 | 363 | S | R | R | R | S | V | S | E | R |
| M.5 | 364 | S | A | R | A | K | V | S | Q | R |
| M.6 | 365 | A | R | R | N | A | V | S | Q | R |
| M.7 | 366 | S | S | R | S | H | C | S | Q | R |
| M.8 | 367 | S | S | R | A | H | V | S | Q | R |
| M.9 | 368 | S | R | K | T | G | V | A | Q | R |
| M.10 | 369 | S | A | R | H | S | V | S | E | R |
| M.11 | 370 | S | N | R | K | R | V | S | Q | R |
| M.12 | 371 | S | R | R | R | A | V | S | E | K |
| M.13 | 372 | S | K | A | N | R | V | S | Q | R |
| M.14 | 373 | A | S | K | H | S | V | S | Q | R |
| M.15 | 374 | A | S | A | G | T | V | S | Q | K |
| M.16 | 375 | S | S | R | A | H | V | S | Q | R |
| M.17 | 376 | S | S | R | S | T | V | S | E | R |
| M.18 | 377 | S | S | R | S | D | V | S | Q | R |
| M.19 | 378 | S | A | R | S | G | V | A | Q | R |
| M.20 | 379 | S | A | R | S | S | V | S | Q | R |
| M.21 | 380 | A | K | C | R | T | V | A | Q | R |
| M.22 | 381 | S | N | R | G | R | V | S | Q | R |
| M.23 | 382 | S | A | R | R | N | V | A | Q | R |
| M.24 | 383 | S | T | R | G | T | V | S | Q | R |
| M.25 | 384 | A | S | R | R | S | V | A | E | R |
| M.26 | 385 | S | A | R | R | H | V | S | Q | R |
| M.27 | 386 | S | S | R | N | Y | I | S | Q | R |
| M.28 | 387 | A | R | R | A | T | C | S | E | K |
| M.29 | 388 | S | R | C | S | N | V | S | Q | R |
| M.30 | 389 | A | K | R | H | P | T | S | Q | R |

TABLE 158
CHO iGFFP Assay GTAA Center Sequence Cleavage

| | SEQ ID | |
|---|---|---|
| Meganuclease | NO: | GFP % |
| LOX 3-4bs | — | 0.47 |
| CHO 23/24 | — | 13.64 |
| M.1 | 360 | 5.94 |
| M.2 | 361 | 8.28 |
| M.3 | 362 | 9.40 |
| M.4 | 363 | 9.32 |
| M.5 | 364 | 9.37 |
| M.6 | 365 | 11.44 |
| M.7 | 366 | 9.99 |
| M.8 | 367 | 8.07 |
| M.9 | 368 | 6.66 |
| M.10 | 369 | 9.02 |
| M.11 | 370 | 7.34 |
| M.12 | 371 | 9.80 |
| M.13 | 372 | 7.81 |
| M.14 | 373 | 8.29 |
| M.15 | 374 | 11.52 |
| M.16 | 375 | 9.88 |
| M.17 | 376 | 8.22 |
| M.18 | 377 | 8.46 |
| M.19 | 378 | 7.59 |
| M.20 | 379 | 7.35 |
| M.21 | 380 | 7.28 |
| M.22 | 381 | 7.45 |
| M.23 | 382 | 13.19 |
| M.24 | 383 | 8.03 |
| M.25 | 384 | 8.02 |
| M.26 | 385 | 8.06 |
| M.27 | 386 | 6.42 |
| M.28 | 387 | 6.67 |
| M.29 | 388 | 7.89 |
| M.30 | 389 | 7.51 |

### Example 18

### Engineered Meganucleases Cleaving Recognition Sequences Containing an GTAG Four Base Pair Center Sequence

[1259] Novel engineered meganucleases derived from the LOX 3-4x.109 meganuclease were prepared by making amino acid substitutions at one or more positions in the first subunit. These engineered meganucleases were then evaluated for cleavage of the LOX 3-4 recognition sequence modified to have a GTAG center sequence (SEQ ID NO: 390) in the CHO reporter assay according to Example 1. The substitutions in the first subunit are provided in Table 159. The results of the CHO reporter assay are provided in Table 160. Novel meganucleases which were modified to comprise the residues recited in the tables below were capable of cleaving the LOX 3-4 recognition sequence having a GTAG four base pair center sequence.

TABLE 159
Meganucleases Optimized for GTAG Center
Sequence (First Subunit - Lox3)

| | | I-CreI Position | | | | | | |
|---|---|---|---|---|---|---|---|---|
| | SEQ | 19 | 50 | 71 | 72 | 73 | 80 | 139 |
| Nuclease | ID | 19 | 50 | 71 | 72 | 73 | 80 | 139 |
| m.95 | 392 | A | R | S | N | R | Q | K |
| m.96 | 393 | S | R | D | G | R | Q | K |
| m.97 | 394 | A | R | S | N | R | Q | K |
| m.102 | 395 | A | R | S | G | R | Q | K |
| m.108 | 396 | A | R | S | G | R | Q | K |
| m.111 | 397 | A | R | S | N | R | Q | K |
| m.114 | 398 | S | C | S | N | R | Q | R |
| m.123 | 399 | S | R | D | G | R | Q | K |

TABLE 160
CHO iGFFP Assay GTAG Center Sequence Cleavage

| | SEQ ID | |
|---|---|---|
| Meganuclease | NO: | GFP % |
| LOX 3-4bs | — | 0.73 |
| CHO 23/24 | — | 15.76 |
| m.95 | 392 | 18.56 |
| m.96 | 393 | 15.46 |
| m.97 | 394 | 17.25 |
| m.102 | 395 | 13.85 |
| m.108 | 396 | 19.70 |
| m.111 | 397 | 16.98 |
| m.114 | 398 | 14.18 |
| m.123 | 399 | 13.82 |

### Example 19

### Engineered Meganucleases Cleaving Recognition Sequences Containing an GTAT Four Base Pair Center Sequence

[1260] Novel engineered meganucleases derived from the LOX 3-4x.109 meganuclease were prepared by making amino acid substitutions at one or more positions in the first subunit. These engineered meganucleases were then evaluated for cleavage of the LOX 3-4 recognition sequence modified to have a GTAT center sequence (SEQ ID NO: 400) in the CHO reporter assay according to Example 1. The substitutions in the first subunit are provided in Table 161. The results of the CHO reporter assay are provided in Table 162. Novel meganucleases which were modified to comprise the residues recited in the tables below were capable of cleaving the LOX 3-4 recognition sequence having a GTAT four base pair center sequence.

TABLE 161
Meganucleases Optimized for GTAT Center
Sequence (First Subunit - Lox3)

| | | I-CreI Position | | | | | | | | |
|---|---|---|---|---|---|---|---|---|---|---|
| | SEQ | 19 | 48 | 50 | 71 | 72 | 73 | 74 | 80 | 139 |
| Nuclease | ID | 19 | 48 | 50 | 71 | 72 | 73 | 74 | 80 | 139 |
| m.124 | 402 | S | K | V | T | K | C | S | Q | R |
| m.125 | 403 | S | H | S | G | Y | C | S | E | R |
| m.126 | 404 | S | K | C | G | W | C | S | Q | R |
| m.127 | 405 | S | H | S | G | R | A | S | Q | R |
| m.128 | 406 | S | G | R | G | R | A | S | Q | K |
| m.129 | 407 | S | A | R | K | N | C | C | Q | R |
| m.130 | 408 | S | A | Q | G | R | A | S | Q | R |
| m.131 | 409 | A | T | R | G | R | A | S | E | K |
| m.132 | 410 | S | A | R | A | S | C | A | Q | K |
| m.133 | 411 | S | K | T | H | T | A | S | Q | R |
| m.134 | 412 | S | S | R | Y | G | S | S | Q | R |
| m.135 | 413 | S | M | R | G | R | A | S | Q | R |
| m.136 | 414 | A | S | G | G | R | A | S | Q | K |
| m.137 | 415 | S | A | K | R | S | A | S | E | K |
| m.138 | 416 | S | A | R | H | T | A | S | Q | K |
| m.139 | 417 | A | L | K | R | K | A | S | E | R |
| m.140 | 418 | S | A | R | G | R | A | S | Q | R |
| m.141 | 419 | S | K | R | T | H | C | S | Q | R |
| m.142 | 420 | A | H | R | G | R | A | S | Q | T |
| m.143 | 421 | S | K | K | R | A | A | S | Q | H |
| m.144 | 422 | S | A | R | L | G | C | A | Q | R |
| m.145 | 423 | S | K | K | S | G | S | S | E | R |
| m.146 | 424 | S | K | R | T | H | C | S | Q | R |
| m.147 | 425 | S | R | R | G | R | A | S | Q | K |
| m.148 | 426 | A | L | R | R | R | A | S | Q | R |
| m.149 | 427 | S | A | K | G | R | A | S | Q | R |
| m.150 | 428 | S | K | R | G | N | A | S | E | R |
| m.151 | 429 | S | T | R | G | R | A | S | Q | K |
| m.152 | 430 | S | A | R | N | R | A | A | Q | K |
| m.153 | 431 | S | L | S | K | R | C | S | Q | K |
| m.154 | 432 | S | L | R | N | R | T | S | Q | R |
| m.155 | 433 | S | K | L | G | R | A | S | Q | R |

TABLE 162
CHO iGFFP Assay GTAT Center Sequence Cleavage

| | SEQ ID | |
|---|---|---|
| Meganuclease | NO: | GFP % |
| LOX 3-4bs | — | 0.55 |
| CHO 23/24 | — | 16.59 |
| m.124 | 402 | 10.13 |
| m.125 | 403 | 12.37 |
| m.126 | 404 | 8.27 |
| m.127 | 405 | 11.88 |
| m.128 | 406 | 6.59 |
| m.129 | 407 | 9.93 |
| m.130 | 408 | 14.03 |
| m.131 | 409 | 10.81 |
| m.132 | 410 | 8.81 |
| m.133 | 411 | 10.15 |
| m.134 | 412 | 8.65 |
| m.135 | 413 | 4.58 |
| m.136 | 414 | 9.67 |
| m.137 | 415 | 10.69 |
| m.138 | 416 | 6.70 |
| m.139 | 417 | 11.52 |
| m.140 | 418 | 13.07 |
| m.141 | 419 | 8.70 |
| m.142 | 420 | 9.32 |
| m.143 | 421 | 6.73 |
| m.144 | 422 | 4.43 |
| m.145 | 423 | 11.43 |
| m.146 | 424 | 9.14 |
| m.147 | 425 | 9.21 |
| m.148 | 426 | 12.40 |
| m.149 | 427 | 12.94 |
| m.150 | 428 | 9.61 |
| m.151 | 429 | 9.43 |
| m.152 | 430 | 4.43 |
| m.153 | 431 | 9.14 |
| m.154 | 432 | 9.28 |
| m.155 | 433 | 8.29 |

### Example 20

### Engineered Meganucleases Cleaving Recognition Sequences Containing an GTGA Four Base Pair Center Sequence

[1261] Novel engineered meganucleases derived from the LOX 3-4x.109 meganuclease were prepared by making amino acid substitutions at one or more positions in the first subunit. These engineered meganucleases were then evaluated for cleavage of the LOX 3-4 recognition sequence modified to have a GTGA center sequence (SEQ ID NO: 434) in the CHO reporter assay according to Example 1. The substitutions in the first subunit are provided in Table 163. The results of the CHO reporter assay are provided in Table 164. Novel meganucleases which were modified to comprise the residues recited in the tables below were capable of cleaving the LOX 3-4 recognition sequence having a GTGA four base pair center sequence.

TABLE 163
Meganucleases Optimized for GTGA Center
Sequence (First Subunit - Lox3)

| | | I-CreI Position | | | | | | | | |
|---|---|---|---|---|---|---|---|---|---|---|
| | SEQ | 19 | 48 | 50 | 71 | 72 | 73 | 74 | 80 | 139 |
| Nuclease | ID | 19 | 48 | 50 | 71 | 72 | 73 | 74 | 80 | 139 |
| M.31 | 436 | S | A | R | R | T | V | S | E | K |
| M.32 | 437 | A | S | R | R | T | V | A | E | R |
| M.33 | 438 | A | G | R | G | S | V | S | Q | R |
| M.35 | 439 | A | R | R | R | G | V | S | Q | R |
| M.36 | 440 | A | K | R | R | H | V | T | Q | R |
| M.37 | 441 | S | S | R | G | T | V | S | E | R |
| M.38 | 442 | S | S | R | V | S | V | S | E | K |
| M.39 | 443 | S | A | R | S | K | V | S | Q | R |
| M.40 | 444 | S | G | R | S | G | V | S | Q | K |
| M.41 | 445 | S | S | R | A | K | V | A | Q | K |
| M.42 | 446 | S | S | R | R | S | V | A | Q | R |
| M.43 | 447 | A | S | R | T | R | V | S | E | K |
| M.44 | 448 | S | A | R | R | R | V | A | Q | K |
| M.46 | 449 | S | R | V | N | G | V | S | Q | R |
| M.47 | 450 | A | R | R | G | S | V | S | E | K |
| M.48 | 451 | S | S | R | R | R | V | S | Q | R |
| M.49 | 452 | S | S | R | R | H | V | S | Q | R |
| M.50 | 453 | A | S | R | R | K | V | G | E | R |
| M.51 | 454 | A | G | R | S | R | V | S | Q | K |
| M.52 | 455 | S | K | C | T | G | V | S | Q | R |
| M.53 | 456 | S | S | R | D | T | V | S | Q | R |
| M.54 | 457 | S | S | R | H | R | V | A | Q | K |
| M.56 | 458 | S | S | R | H | T | V | S | Q | R |
| M.57 | 459 | A | S | R | R | Y | V | S | Q | R |
| M.58 | 460 | S | H | R | R | R | V | A | E | R |
| M.59 | 461 | S | S | R | S | R | T | S | Q | K |
| M.61 | 462 | A | K | S | A | T | A | S | Q | R |

TABLE 164
CHO iGFFP Assay GTGA Center Sequence Cleavage

| | SEQ ID | |
|---|---|---|
| Meganuclease | NO: | GFP % |
| LOX 3-4bs | — | 0.88 |
| CHO 23/24 | — | 14.31 |
| M.31 | 436 | 8.62 |
| M.32 | 437 | 5.92 |
| M.33 | 438 | 5.17 |
| M.35 | 439 | 5.68 |
| M.36 | 440 | 2.75 |
| M.37 | 441 | 6.33 |
| M.38 | 442 | 6.03 |
| M.39 | 443 | 8.66 |
| M.40 | 444 | 4.47 |
| M.41 | 445 | 3.08 |
| M.42 | 446 | 4.21 |
| M.43 | 447 | 4.61 |
| M.44 | 448 | 3.56 |
| M.46 | 449 | 7.53 |
| M.47 | 450 | 10.09 |
| M.48 | 451 | 8.48 |
| M.49 | 452 | 6.21 |
| M.50 | 453 | 2.94 |
| M.51 | 454 | 4.59 |
| M.52 | 455 | 4.42 |
| M.53 | 456 | 5.55 |
| M.54 | 457 | 6.22 |
| M.56 | 458 | 6.66 |
| M.57 | 459 | 7.12 |
| M.58 | 460 | 4.04 |
| M.59 | 461 | 4.93 |
| M.61 | 462 | 7.06 |

### Example 21

### Engineered Meganucleases Cleaving Recognition Sequences Containing an GTGC Four Base Pair Center Sequence

[1262] Novel engineered meganucleases derived from the LOX 3-4x.109 meganuclease were prepared by making amino acid substitutions at one or more positions in the first subunit. These engineered meganucleases were then evaluated for cleavage of the LOX 3-4 recognition sequence modified to have a GTGC center sequence (SEQ ID NO: 463) in the CHO reporter assay according to Example 1. The substitutions in the first subunit are provided in Table 165. The results of the CHO reporter assay are provided in Table 166. Novel meganucleases which were modified to comprise the residues recited in the tables below were capable of cleaving the LOX 3-4 recognition sequence having a GTGC four base pair center sequence.

TABLE 165
Meganucleases Optimized for GTGC Center
Sequence (First Subunit - Lox3)

| | | I-CreI Position | | | | | | | | |
|---|---|---|---|---|---|---|---|---|---|---|
| | SEQ | 19 | 48 | 50 | 71 | 72 | 73 | 74 | 80 | 139 |
| Nuclease | ID | 19 | 48 | 50 | 71 | 72 | 73 | 74 | 80 | 139 |
| m.156 | 465 | S | L | R | S | K | V | S | Q | K |
| m.157 | 466 | S | K | R | S | S | T | A | Q | K |
| m.158 | 467 | S | R | R | K | M | C | S | E | K |
| m.159 | 468 | S | L | R | G | P | C | S | E | K |
| m.160 | 469 | S | H | R | N | G | T | S | Q | T |
| m.161 | 470 | S | A | R | A | C | T | S | Q | K |
| m.162 | 471 | A | K | K | T | T | T | A | Q | K |
| m.163 | 472 | S | A | R | S | H | T | S | Q | K |
| m.164 | 473 | A | K | R | I | P | T | S | Q | K |
| m.165 | 474 | A | K | S | E | P | T | S | Q | K |
| m.166 | 475 | S | R | R | Y | T | T | S | Q | K |
| m.167 | 476 | S | H | R | R | S | A | S | E | K |
| m.168 | 477 | S | K | R | Q | S | N | S | Q | K |
| m.169 | 478 | S | K | R | Y | N | N | S | Q | K |
| m.170 | 479 | A | K | V | R | A | T | T | E | K |
| m.171 | 480 | S | R | K | S | S | T | S | Q | K |
| m.172 | 481 | S | K | R | S | M | V | S | Q | R |
| m.173 | 482 | A | L | K | T | A | T | S | Q | K |
| m.174 | 483 | S | N | R | R | S | T | A | Q | K |
| m.175 | 484 | A | K | R | Y | R | T | S | Q | H |
| m.176 | 485 | S | K | R | G | P | T | S | Q | V |
| m.177 | 486 | S | R | V | N | S | T | S | E | K |
| m.178 | 487 | A | L | R | S | Q | T | S | E | K |
| m.179 | 488 | A | K | R | F | R | T | S | E | K |
| m.180 | 489 | A | R | I | G | A | V | S | Q | K |
| m.181 | 490 | S | S | R | R | N | C | S | Q | T |
| m.182 | 491 | S | N | G | V | G | V | T | Q | H |
| m.183 | 492 | A | S | R | R | M | L | S | E | K |
| m.184 | 493 | S | H | R | S | R | T | S | Q | S |
| m.185 | 494 | S | K | K | T | D | T | A | Q | K |
| m.186 | 495 | S | K | S | S | K | T | S | Q | K |

TABLE 166
CHO iGFFP Assay GTGC Center Sequence Cleavage

| | SEQ ID | |
|---|---|---|
| Meganuclease | NO: | GFP % |
| LOX 3-4bs | — | 0.98 |
| CHO 23/24 | — | 18.47 |
| m.156 | 465 | 8.44 |
| m.157 | 466 | 7.01 |
| m.158 | 467 | 10.07 |
| m.159 | 468 | 8.26 |
| m.160 | 469 | 11.82 |
| m.161 | 470 | 10.49 |
| m.162 | 471 | 10.57 |
| m.163 | 472 | 10.92 |
| m.164 | 473 | 9.52 |
| m.165 | 474 | 11.73 |
| m.166 | 475 | 8.58 |
| m.167 | 476 | 8.49 |
| m.168 | 477 | 10.87 |
| m.169 | 478 | 11.88 |
| m.170 | 479 | 10.93 |
| m.171 | 480 | 10.69 |
| m.172 | 481 | 9.02 |
| m.173 | 482 | 9.31 |
| m.174 | 483 | 9.77 |
| m.175 | 484 | 9.74 |
| m.176 | 485 | 12.33 |
| m.177 | 486 | 11.16 |
| m.178 | 487 | 10.64 |
| m.179 | 488 | 10.71 |
| m.180 | 489 | 13.69 |
| m.181 | 490 | 13.83 |
| m.182 | 491 | 12.24 |
| m.183 | 492 | 12.32 |
| m.184 | 493 | 10.48 |
| m.185 | 494 | 9.23 |
| m.186 | 495 | 13.44 |

### Example 22

### Engineered Meganucleases Cleaving Recognition Sequences Containing an GTGG Four Base Pair Center Sequence

[1263] Novel engineered meganucleases derived from the LOX 3-4x.109 meganuclease were prepared by making amino acid substitutions at one or more positions in the first subunit. These engineered meganucleases were then evaluated for cleavage of the LOX 3-4 recognition sequence modified to have a GTGG center sequence (SEQ ID NO: 496) in the CHO reporter assay according to Example 1. The substitutions in the first subunit are provided in Table 167. The results of the CHO reporter assay are provided in Table 168. Novel meganucleases which were modified to comprise the residues recited in the tables below were capable of cleaving the LOX 3-4 recognition sequence having a GTGG four base pair center sequence.

TABLE 167
Meganucleases Optimized for GTGG Center
Sequence (First Subunit - Lox3)

| | | I-CreI Position | | | | | | |
|---|---|---|---|---|---|---|---|---|
| | SEQ | 19 | 50 | 62 | 71 | 72 | 73 | 80 |
| Nuclease | ID | 19 | 50 | 62 | 71 | 72 | 73 | 80 |
| m.187 | 498 | A | R | I | S | G | R | Q |
| m.192 | 499 | G | Q | V | G | S | V | Q |
| m.201 | 500 | G | Q | I | G | S | V | E |
| m.203 | 501 | S | R | I | D | G | R | Q |

TABLE 168
CHO iGFFP Assay GTGG Center Sequence Cleavage

| | SEQ ID | |
|---|---|---|
| Meganuclease | NO: | GFP % |
| Lox 3-4 bs | — | 0.71 |
| CHO 23/24 | — | 9.33 |
| m.187 | 498 | 17.61 |
| m.192 | 499 | 11.88 |
| m.201 | 500 | 10.96 |
| m.203 | 501 | 12.14 |

### Example 23

### Engineered Meganucleases Cleaving Recognition Sequences Containing an GTGT Four Base Pair Center Sequence

[1264] Novel engineered meganucleases derived from the LOX 3-4x.109 meganuclease were prepared by making amino acid substitutions at one or more positions in the first subunit. These engineered meganucleases were then evaluated for cleavage of the LOX 3-4 recognition sequence modified to have a GTGT center sequence (SEQ ID NO: 502) in the CHO reporter assay according to Example 1. The substitutions in the first subunit are provided in Table 169. The results of the CHO reporter assay are provided in Table 170. Novel meganucleases which were modified to comprise the residues recited in the tables below were capable of cleaving the LOX 3-4 recognition sequence having a GTGT four base pair center sequence.

TABLE 169
Meganucleases Optimized for GTGT Center
Sequence (First Subunit - Lox3)

| | | I-CreI Position | | | | | | | | |
|---|---|---|---|---|---|---|---|---|---|---|
| | SEQ | 19 | 48 | 50 | 71 | 72 | 73 | 74 | 80 | 139 |
| Nuclease | ID | 19 | 48 | 50 | 71 | 72 | 73 | 74 | 80 | 139 |
| M.63 | 504 | S | K | V | G | R | A | S | Q | R |
| M.64 | 505 | S | K | R | G | P | S | S | Q | K |
| M.65 | 506 | S | S | R | G | R | A | S | Q | K |
| M.66 | 507 | S | L | R | G | R | A | S | Q | R |
| M.67 | 508 | S | L | R | R | A | C | S | Q | R |
| M.68 | 509 | S | K | R | R | Q | A | S | E | K |
| M.69 | 510 | S | K | Q | G | K | A | A | Q | K |
| M.70 | 511 | S | V | R | G | R | A | S | Q | K |
| M.71 | 512 | S | K | S | G | R | A | S | Q | R |
| M.73 | 513 | S | L | K | N | R | A | S | Q | R |
| M.74 | 514 | S | K | A | G | R | A | S | Q | K |
| M.75 | 515 | S | L | R | G | R | A | S | Q | K |
| M.77 | 516 | S | K | E | G | R | A | S | E | K |
| M.78 | 517 | S | K | K | H | R | A | S | Q | R |
| M.80 | 518 | S | K | R | A | T | A | S | Q | R |
| M.83 | 519 | S | K | R | T | G | T | S | Q | R |
| M.84 | 520 | A | L | R | N | K | A | S | E | K |
| M.85 | 521 | S | K | R | R | Q | A | S | E | K |
| M.86 | 522 | A | G | R | G | R | A | S | Q | K |
| M.87 | 523 | S | R | R | G | R | A | S | Q | K |
| M.88 | 524 | S | K | C | A | R | A | S | Q | R |
| M.89 | 525 | S | S | V | G | R | A | S | Q | K |
| M.90 | 526 | A | S | R | G | V | A | T | E | K |
| M.91 | 527 | A | K | Q | G | R | A | S | E | K |
| M.92 | 528 | S | N | R | G | R | A | S | Q | R |
| M.93 | 529 | S | G | R | G | R | A | S | Q | K |

TABLE 170
CHO iGFFP Assay GTGT Center Sequence Cleavage

| | SEQ ID | |
|---|---|---|
| Meganuclease | NO: | GFP % |
| LOX 3-4bs | — | 0.53 |
| CHO 23/24 | — | 16.40 |
| M.63 | 504 | 11.21 |
| M.64 | 505 | 10.02 |
| M.65 | 506 | 7.79 |
| M.66 | 507 | 6.08 |
| M.67 | 508 | 4.78 |
| M.68 | 509 | 10.46 |
| M.69 | 510 | 11.86 |
| M.70 | 511 | 7.47 |
| M.71 | 512 | 12.25 |
| M.73 | 513 | 6.62 |
| M.74 | 514 | 11.48 |
| M.75 | 515 | 7.17 |
| M.77 | 516 | 12.41 |
| M.78 | 517 | 7.75 |
| M.80 | 518 | 7.95 |
| M.83 | 519 | 8.17 |
| M.84 | 520 | 10.16 |
| M.85 | 521 | 11.61 |
| M.86 | 522 | 9.81 |
| M.87 | 523 | 14.04 |
| M.88 | 524 | 9.32 |
| M.89 | 525 | 9.51 |
| M.90 | 526 | 7.53 |
| M.91 | 527 | 10.94 |
| M.92 | 528 | 11.53 |
| M.93 | 529 | 10.69 |

### Example 24

### Engineered Meganucleases Cleaving Recognition Sequences Containing an TCAA Four Base Pair Center Sequence

[1265] Novel engineered meganucleases derived from the LOX 3-4x.109 meganuclease were prepared by making amino acid substitutions at one or more positions in the first subunit and one or more positions in the second subunit. These engineered meganucleases were then evaluated for cleavage of the LOX 3-4 recognition sequence modified to have a TCAA center sequence (SEQ ID NO: 331) in the CHO reporter assay according to Example 1. The substitutions in each subunit are provided in Tables 171 and 172, respectively. The results of the CHO reporter assay are provided in Table 173.

[1266] Following the modifications shown below, substantial improvements in cleavage of the recognition sequence having the TCAA four base pair center sequence were observed.

TABLE 171
Meganucleases Optimized for TCAA Center
Sequence (First Subunit - Lox3)

| | | I-CreI Position | | | | | | |
|---|---|---|---|---|---|---|---|---|
| | SEQ | 19 | 48 | 50 | 71 | 72 | 80 | 139 |
| Nuclease | ID | 19 | 48 | 50 | 71 | 72 | 80 | 139 |
| x.109 | 8 | A | K | Q | G | R | Q | K |
| m.2157 | 333 | S | S | R | G | S | E | K |
| m.2165 | 334 | S | S | R | R | S | E | K |
| m.2189 | 335 | A | K | R | G | S | E | K |
| m.2207 | 336 | A | K | T | G | P | Q | K |
| m.2225 | 337 | S | S | R | G | T | E | K |
| m.2229 | 338 | A | K | T | G | R | Q | R |
| m.2235 | 339 | A | K | C | T | G | Q | R |
| m.2238 | 340 | S | S | R | G | S | E | K |

TABLE 172
Meganucleases Optimized for TCAA Center Sequence (Second Subunit - Lox4)

| | | I-CreI Position | | | | | | | |
|---|---|---|---|---|---|---|---|---|---|
| | SEQ | 19 | 48 | 50 | 72 | 73 | 74 | 80 | 139 |
| Nuclease | ID | 210 | 239 | 241 | 263 | 264 | 265 | 271 | 330 |
| x.109 | 8 | G | H | S | T | H | S | Q | K |
| m.2157 | 333 | G | S | K | R | I | A | Q | R |
| m.2165 | 334 | G | S | R | Q | I | A | Q | R |
| m.2189 | 335 | G | K | C | R | I | A | E | R |
| m.2207 | 336 | G | S | K | R | I | A | E | R |
| m.2225 | 337 | G | K | E | R | I | A | Q | R |
| m.2229 | 338 | G | K | C | N | I | A | Q | R |
| m.2235 | 339 | G | S | K | Q | I | S | Q | R |
| m.2238 | 340 | S | S | K | S | I | A | Q | R |

TABLE 173
CHO iGFFP Assay TCAA Center Sequence Cleavage

| | SEQ ID | |
|---|---|---|
| Meganuclease | NO: | GFP % |
| LOX 3-4bs | — | 0.91 |
| CHO 23/24 | — | 27.71 |
| x.109 | 8 | 0.31 |
| m.2157 | 333 | 9.79 |
| m.2165 | 334 | 10.32 |
| m.2189 | 335 | 11.69 |
| m.2207 | 336 | 8.52 |
| m.2225 | 337 | 8.77 |
| m.2229 | 338 | 11.81 |
| m.2235 | 339 | 8.99 |
| m.2238 | 340 | 9.39 |

### Example 25

### Engineered Meganucleases Cleaving Recognition Sequences Containing an TTAA Four Base Pair Center Sequence

[1267] Novel engineered meganucleases derived from the LOX 3-4x.109 meganuclease were prepared by making amino acid substitutions at one or more positions in the first subunit and one or more positions in the second subunit. These engineered meganucleases were then evaluated for cleavage of the LOX 3-4 recognition sequence modified to have a TTAA center sequence (SEQ ID NO: 341) in the CHO reporter assay according to Example 1. The substitutions in each subunit are provided in Tables 174 and 175, respectively. The results of the CHO reporter assay are provided in Table 176.

[1268] Following the modifications shown below, substantial improvements in cleavage of the recognition sequence having the TTAA four base pair center sequence were observed.

TABLE 174
Meganucleases Optimized for TTAA Center
Sequence (First Subunit - Lox3)

| | | I-CreI Position | | | | | | | |
|---|---|---|---|---|---|---|---|---|---|
| | SEQ | 19 | 48 | 50 | 71 | 72 | 74 | 80 | 139 |
| Nuclease | ID | 19 | 48 | 50 | 71 | 72 | 74 | 80 | 139 |
| x.109 | 8 | A | K | Q | G | R | S | Q | K |
| m.2071 | 343 | G | N | R | G | T | S | Q | R |
| m.2077 | 344 | S | K | V | R | S | S | Q | R |
| m.2082 | 345 | S | S | R | N | N | A | E | R |
| m.2086 | 346 | G | K | K | G | S | S | E | R |
| m.2087 | 347 | A | K | K | N | R | A | Q | R |
| m.2102 | 348 | S | R | R | S | D | S | Q | R |
| m.2111 | 349 | G | K | R | G | T | S | Q | R |
| m.2116 | 350 | A | K | V | R | R | S | Q | R |
| m.2125 | 351 | G | K | R | A | Q | A | E | R |
| m.2132 | 352 | A | K | K | G | T | S | E | R |
| m.2138 | 353 | G | K | R | N | K | S | E | R |
| m.2141 | 354 | S | S | R | G | A | S | Q | K |
| m.2142 | 355 | S | S | R | N | N | A | E | R |
| m.2145 | 356 | G | N | R | G | T | S | Q | R |
| m.2151 | 357 | G | K | S | G | S | S | Q | R |

TABLE 175
Meganucleases Optimized for TTAA Center Sequence (Second Subunit - Lox4)

| | | I-CreI Position | | | | | | | | |
|---|---|---|---|---|---|---|---|---|---|---|
| | SEQ | 19 | 48 | 50 | 66 | 72 | 73 | 74 | 80 | 139 |
| Nuclease | ID | 210 | 239 | 241 | 257 | 263 | 264 | 265 | 271 | 330 |
| x.109 | 8 | G | H | S | Y | T | H | S | Q | K |
| m.2071 | 343 | A | K | C | Y | K | I | S | Q | R |
| m.2077 | 344 | G | S | K | Y | R | I | A | Q | R |
| m.2082 | 345 | G | S | R | Y | K | I | S | Q | R |
| m.2086 | 346 | A | S | K | Y | A | I | S | Q | R |
| m.2087 | 347 | G | A | K | Y | K | I | A | Q | R |
| m.2102 | 348 | G | S | R | H | S | I | A | Q | R |
| m.2111 | 349 | A | S | T | Y | R | V | A | Q | R |
| m.2116 | 350 | G | A | K | Y | R | I | S | Q | R |
| m.2125 | 351 | A | S | K | Y | R | I | S | Q | R |
| m.2132 | 352 | G | K | E | Y | Q | I | A | Q | R |
| m.2138 | 353 | S | S | K | Y | S | I | A | Q | R |
| m.2141 | 354 | G | A | R | Y | T | I | A | Q | R |
| m.2142 | 355 | G | S | R | Y | K | I | S | Q | R |
| m.2145 | 356 | A | K | C | Y | K | I | S | Q | R |
| m.2151 | 357 | A | T | K | Y | R | V | A | Q | R |

TABLE 176
CHO iGFFP Assay TTAA Center Sequence Cleavage

| | SEQ ID | |
|---|---|---|
| Meganuclease | NO: | GFP % |
| LOX 3-4bs | — | 3.03 |
| CHO 23/24 | — | 16.58 |
| x.109 | 8 | 4.60 |
| m.2071 | 343 | 11.22 |
| m.2077 | 344 | 11.75 |
| m.2082 | 345 | 11.62 |
| m.2086 | 346 | 11.95 |
| m.2087 | 347 | 11.65 |
| m.2102 | 348 | 12.42 |
| m.2111 | 349 | 12.01 |
| m.2116 | 350 | 12.36 |
| m.2125 | 351 | 12.70 |
| m.2132 | 352 | 11.81 |
| m.2138 | 353 | 12.60 |
| m.2141 | 354 | 11.71 |
| m.2142 | 355 | 13.94 |
| m.2145 | 356 | 12.89 |
| m.2151 | 357 | 13.04 |

### Example 26

### Engineered Meganucleases Cleaving Recognition Sequences Containing an TTGG Four Base Pair Center Sequence

[1269] Novel engineered meganucleases derived from the LOX 3-4x.109 meganuclease were prepared by making amino acid substitutions at one or more positions in the first subunit and one or more positions in the second subunit. The N-terminal subunit recognizes the reverse complement of the AG portion of the four base pair center sequence, which is CT, and the C-terminal subunit recognizes the GC portion of the two base pair center sequence. These engineered meganucleases were then evaluated for cleavage of the LOX 3-4 recognition sequence modified to have a TTGG center sequence (SEQ ID NO: 248) in the CHO reporter assay according to Example 1. The substitutions in each subunit are provided in Tables 177 and 178, respectively. The results of the CHO reporter assay are provided in Table 179.

[1270] Following the modifications shown below, substantial improvements in cleavage of the recognition sequence having the TTGG four base pair center sequence were observed.

TABLE 177
Meganucleases Optimized for TTGG Center
Sequence (First Subunit - Lox3)

| | | I-CreI Position | | | | | | | |
|---|---|---|---|---|---|---|---|---|---|
| | SEQ | 19 | 50 | 71 | 72 | 73 | 80 | 160 | 171 |
| Nuclease | ID | 19 | 50 | 71 | 72 | 73 | 80 | 160 | 171 |
| x.109 | 8 | A | Q | G | R | A | Q | G | A |
| m.1970 | 250 | G | R | S | G | R | Q | G | A |
| m.1973 | 251 | G | R | S | G | R | Q | G | A |
| m.1974 | 252 | G | R | S | G | R | Q | G | A |
| m.1975 | 253 | G | R | S | G | R | Q | G | A |
| m.1979 | 254 | G | R | S | G | R | Q | G | A |
| m.1980 | 255 | G | R | S | G | R | Q | G | A |
| m.1981 | 256 | G | R | S | G | R | Q | G | A |
| m.1982 | 257 | G | R | S | G | R | Q | G | A |
| m.1986 | 258 | G | R | S | G | R | Q | G | A |
| m.1997 | 259 | G | R | S | G | R | Q | E | A |
| m.2051 | 260 | G | R | S | G | R | Q | G | A |
| m.2052 | 261 | G | R | S | G | R | Q | G | A |
| m.2059 | 262 | G | R | S | G | R | Q | G | T |
| m.1995 | 263 | A | R | S | G | R | Q | G | A |
| m.2045 | 264 | A | R | S | G | R | Q | G | A |
| m.2050 | 265 | A | R | S | G | R | Q | G | A |
| m.2053 | 266 | A | R | S | G | R | Q | G | A |

TABLE 178
Meganucleases Optimized for TTGG Center Sequence (Second Subunit - Lox4)

| | | I-CreI Position | | | | | | | | | | |
|---|---|---|---|---|---|---|---|---|---|---|---|---|
| | SEQ | 19 | 48 | 50 | 66 | 71 | 72 | 73 | 74 | 80 | 85 | 139 |
| Nuclease | ID | 210 | 239 | 241 | 257 | 262 | 263 | 264 | 265 | 271 | 276 | 330 |
| x.109 | 8 | G | H | S | Y | S | T | H | S | Q | H | K |
| m.1970 | 250 | A | K | C | Y | G | Q | I | S | Q | H | R |
| m.1973 | 251 | A | K | C | H | K | K | I | S | Q | H | K |
| m.1974 | 252 | A | K | T | Y | G | T | I | A | Q | H | R |
| m.1975 | 253 | A | K | E | Y | G | R | I | S | Q | H | R |
| m.1979 | 254 | A | K | C | Y | G | H | I | A | Q | H | R |
| m.1980 | 255 | A | S | K | Y | G | A | I | A | Q | H | R |
| m.1981 | 256 | A | S | R | Y | G | S | V | S | Q | H | R |
| m.1982 | 257 | A | S | K | Y | G | T | I | S | Q | H | R |
| m.1986 | 258 | A | K | C | Y | G | R | I | S | Q | H | R |
| m.1997 | 259 | A | S | K | Y | G | K | I | S | Q | H | R |
| m.2051 | 260 | A | K | T | Y | G | A | I | S | Q | H | R |
| m.2052 | 261 | A | S | R | Y | G | R | I | S | Q | R | R |
| m.2059 | 262 | A | S | R | Y | G | A | V | A | Q | H | R |
| m.1995 | 263 | G | K | E | Y | G | K | I | A | Q | H | R |
| m.2045 | 264 | G | S | K | Y | G | K | I | S | Q | H | R |
| m.2050 | 265 | G | S | K | Y | G | S | V | S | Q | H | R |
| m.2053 | 266 | G | S | K | Y | G | T | I | S | Q | H | R |

TABLE 179
CHO iGFFP Assay TTGG Center Sequence Cutting

| | SEQ ID | |
|---|---|---|
| Meganuclease | NO: | GFP % |
| LOX 3-4bs | — | 0.4 |
| CHO 23/24 | — | 16.0 |
| x.109 | 8 | 0.4 |
| m.1970 | 250 | 13.5 |
| m.1973 | 251 | 14.3 |
| m.1974 | 252 | 11.6 |
| m.1975 | 253 | 11.8 |
| m.1979 | 254 | 12.4 |
| m.1980 | 255 | 12.5 |
| m.1981 | 256 | 13.5 |
| m.1982 | 257 | 11.0 |
| m.1986 | 258 | 11.5 |
| m.1997 | 259 | 12.3 |
| m.2051 | 260 | 13.5 |
| m.2052 | 261 | 13.1 |
| m.2059 | 262 | 12.2 |
| m.1995 | 263 | 11.2 |
| m.2045 | 264 | 14.2 |
| m.2050 | 265 | 12.2 |
| m.2053 | 266 | 12.3 |

### Example 27

### Engineered Meganucleases Cleaving Recognition Sequences Containing an GCAG Four Base Pair Center Sequence

[1271] Novel engineered meganucleases derived from the LOX 3-4x.109 meganuclease were prepared by making amino acid substitutions at one or more positions in the first subunit and one or more positions in the second subunit. The N-terminal subunit recognizes the reverse complement of the AG portion of the four base pair center sequence, which is CT, and the C-terminal subunit recognizes the GC portion of the three base pair center sequence. These engineered meganucleases were then evaluated for cleavage of the LOX 3-4 recognition sequence modified to have a GCAG center sequence (SEQ ID NO: 326) in the CHO reporter assay according to Example 1. The substitutions in each subunit are provided in Tables 180 and 181, respectively. The results of the CHO reporter assay are provided in Table 182.

[1272] Following the modifications shown below, substantial improvements in cleavage of the recognition sequence having the GCAG four base pair center sequence were observed.

TABLE 180
Meganucleases Optimized for GCAG Center Sequence
(CT recognizing first Subunit - Lox4)

I-CreI Position

| | SEQ | 19 | 50 | 71 | 72 | 73 | 80 |
|---|---|---|---|---|---|---|---|
| Nuclease | ID | 19 | 50 | 71 | 72 | 73 | 80 |
| x.109 | 8 | A | Q | G | R | A | Q |
| m.494 | 328 | A | R | S | G | R | Q |
| m.509 | 329 | A | R | S | G | R | Q |
| m.524 | 330 | A | R | S | G | R | Q |

TABLE 181
Meganucleases Optimized for GCAG Center Sequence
(GC recognizing second subunit - Lox3)

| | | I-CreI Position | | | | | |
|---|---|---|---|---|---|---|---|
| | SEQ | 48 | 50 | 71 | 72 | 73 | 80 |
| Nuclease | ID | 239 | 241 | 262 | 263 | 264 | 271 |
| x.109 | 8 | H | Q | S | T | H | Q |
| m.494 | 328 | K | Q | G | S | V | Q |
| m.509 | 329 | H | R | G | S | V | Q |
| m.524 | 330 | H | R | G | R | T | Q |

TABLE 182
CHO iGFFP Assay GCAG Center Sequence Cutting

| | SEQ ID | |
|---|---|---|
| Meganuclease | NO: | GFP % |
| LOX 3-4bs | — | 0.35 |
| x.109 | 8 | 0.66 |
| CHO 23-24 | — | 15.17 |
| m.494 | 328 | 13.8 |
| m.509 | 329 | 13.4 |
| m.524 | 330 | 16.6 |

### Example 28

### Substitutions for the N-terminal and C-terminal Recognizing Portions of an I-CreI Derived Meganuclease

[1273] The substitution patterns observed in Examples 1-27 were compiled to determine a subset of amino acid substitutions that can be made to improve cutting of a four base pair center sequence by I-CreI derived meganucleases. Because each subunit of the meganuclease recognizes two of the four bases present in the center sequence, it was discovered that the substitutions made for a first subunit may be paired with the substitutions made in a second subunit. Amino acid residues, which may be substituted for the WT I-CreI residue at the corresponding positions of 48, 50, 71, 72, 73, 73B, and 74 are provided in Table 183 below. Using this methodology, it is possible to derive amino acid residues, which enhance the cutting of a given center sequence, for each subunit of an I-CreI meganuclease. Preparing an I-CreI meganuclease having the indicated amino acids at the corresponding position will be expected to cut a given center sequence. For example, a meganuclease, which cleaves the center sequence ATAG, the residues corresponding to positions 48, 50, 71, 72, 73, 73B, and 74 of I-CreI provided in Table 183 for AT for the first subunit may be combined with residues corresponding to positions 48, 50, 71, 72, 73, 73B, and 74 of I-CreI provided in Table 183 for CT (the reverse complement of AG) for the second subunit. The exemplary predicted substitution of one or more residues in a first subunit and/or in a second subunit corresponding to positions 48, 50, 71, 72, 73, 73B, and 74 of I-CreI for the four base pair centers ATAG, ATAA, ATGA, ATGG, ACAA, ACAG, ACGA, ACGC, ACGG, TTGG, TCAA, GCAA, GCAT, GCGA, GCAG, GTAA, GTGA, GTGG, GTAG, GTAT, and GTGC that were all experimentally tested are provided in Tables 184-205 below. These simplified predicted positions correspond with the positions that were experimentally tested described herein. The exemplary predicted substitution of one or more residues in a first subunit and/or in a second subunit at positions corresponding to positions 48, 50, 71, 72, 73, 73B, and 74 of I-CreI for the four base pair centers CCAG, CCGA, CCGC, CTAA, CTGA are provided in Tables 206-210 below. These centers were not experimentally tested but would be expected to be cleaved by an engineered meganuclease described herein with the modifications shown in Tables 206-210.

TABLE 183
Pairwise Center Sequence Half-Site Amino Acid Residues
I-CreI Position

| Center Half | 48 | 50 | 71 | 72 | 73 | 73B | 74 |
|---|---|---|---|---|---|---|---|
| AC | K, N, Q, H, | K, R, C | G | R | A | — | S |
| | S, C, A, G | | | | | | |
| AT | K, N, Q, H, | K, R, C | G | R | A | — | S |
| | S, C, A, G | | | | | | |
| CC | K | R | D, S, G | G | R | R or no R | S |
| CT | K | C, R | S, G | N, G | R | N/A | S |
| GC | K | K, R | G, R, S, | G, N, S, | T, V | — | S |
| | | | T, N, H | A, R, T, | | | |
| | | | | Q, M, P, | | | |
| | | | | H | | | |
| GT | K | Q | G | S | V | — | S |
| TC | K, N, R, S, | S, R | R, G, S, | T, S, R, | I, V | — | A, S |
| | Q, H, G, A | | T | H | | | |
| TT | K | K, R | G | R, S, T | I, V | — | A, S, T |

TABLE 184
Center Sequence Half-Site Amino Acid Residues for ATAG
I-CreI Position

| Center Half | 48 | 50 | 71 | 72 | 73 | 73B | 74 |
|---|---|---|---|---|---|---|---|
| AT first | K, N, Q, H, | K, R, C | G | R | A | — | S |
| subunit | S, C, A, G | | | | | | |
| AG(CT) | K | C, R | S, G | N, G | R | — | S |
| second | | | | | | | |
| subunit | | | | | | | |

TABLE 185
Center Sequence Half-Site Amino Acid Residues for ATAA
I-CreI Position

| Center Half | 48 | 50 | 71 | 72 | 73 | 73B | 74 |
|---|---|---|---|---|---|---|---|
| AT first | K, N, Q, H, | K, R, | G | R | A | — | S |
| subunit | S, C, A, G | C | | | | | |
| AA(TT) | K | K, R | G | R, S, | I, V | — | A, S, |
| second | | | | T | | | T |
| subunit | | | | | | | |

TABLE 186
Center Sequence Half-Site Amino Acid Residues for ATGA
I-CreI Position

| Center Half | 48 | 50 | 71 | 72 | 73 | 73B | 74 |
|---|---|---|---|---|---|---|---|
| AT first | K, N, Q, H, | K, R, | G | R | A | — | S |
| subunit | S, C, A, G | C | | | | | |
| GA(TC) | K, N, R, S, | S, R | R, G, | T, S, | I, V | — | A, S |
| second | Q, H, G, A | | S, T | R, H | | | |
| subunit | | | | | | | |

TABLE 187
Center Sequence Half-Site Amino Acid Residues for ATGG
I-CreI Position

| Center Half | 48 | 50 | 71 | 72 | 73 | 73B | 74 |
|---|---|---|---|---|---|---|---|
| AT first | K, N, Q, H, | K, R, | G | R | A | — | S |
| subunit | S, C, A, G | C | | | | | |
| GG(CC) | K | R | D, S, | G | R | R or | S |
| second | | | G | | | no R | |
| subunit | | | | | | | |

TABLE 188
Center Sequence Half-Site Amino Acid Residues for ACAA
I-CreI Position

| Center Half | 48 | 50 | 71 | 72 | 73 | 73B | 74 |
|---|---|---|---|---|---|---|---|
| AC first | K, N, Q, H, | K, R, | G | R | A | — | S |
| subunit | S, C, A, G | C | | | | | |
| AA(TT) | K | K, R | G | R, S, | I, V | — | A, S, |
| second | | | | T | | | T |
| subunit | | | | | | | |

TABLE 189
Center Sequence Half-Site Amino Acid Residues for ACAG
I-CreI Position

| Center Half | 48 | 50 | 71 | 72 | 73 | 73B | 74 |
|---|---|---|---|---|---|---|---|
| AC first | K, N, Q, H, | K, R, | G | R | A | — | S |
| subunit | S, C, A, G | C | | | | | |
| AG(CT) | K | C | G >> S | G > R | R | — | S |
| second | | | | | | | |
| subunit | | | | | | | |

TABLE 190
Center Sequence Half-Site Amino Acid
Residues for ACGA I-CreI Position

| Center | | | | | | | |
|---|---|---|---|---|---|---|---|
| Half | 48 | 50 | 71 | 72 | 73 | 73B | 74 |
| AC first | K, N, Q, | K, R, C | G | R | A | — | S |
| subunit | H, S, C, | | | | | | |
| | A, G | | | | | | |
| GA(TC) | K, N, R, | S, R | R, G, S, | T, S, R, | I, V | — | A, S |
| second | S, Q, H, | | T | H | | | |
| subunit | G, A | | | | | | |

TABLE 191
Center Sequence Half-Site Amino Acid Residues for ACGC
I-CreI Position

| Center Half | 48 | 50 | 71 | 72 | 73 | 73B | 74 |
|---|---|---|---|---|---|---|---|
| AC first | K, N, Q, H, | K, R, | G | R | A | — | S |
| subunit | S, C, A, G | C | | | | | |
| AG(CT) | K | K, R | G, R, | G, N, S, | T, V | — | S |
| second | | | S, T, | A, R, T, | | | |
| subunit | | | N, H | Q, M, P, | | | |
| | | | | H | | | |

TABLE 192
Center Sequence Half-Site Amino Acid Residues for ACGG
I-CreI Position

| Center Half | 48 | 50 | 71 | 72 | 73 | 73B | 74 |
|---|---|---|---|---|---|---|---|
| AC first | K, N, Q, H, | K, R, | G | R | A | — | S |
| subunit | S, C, A, G | C | | | | | |
| AG(CT) | K | R | D, S, | G | R | R or | S |
| second | | | G | | | no R | |
| subunit | | | | | | | |

TABLE 193
Center Sequence Half-Site Amino Acid Residues for TTAA
I-CreI Position

| Center Half | 48 | 50 | 71 | 72 | 73 | 73B | 74 |
|---|---|---|---|---|---|---|---|
| AC first | R, K, | K, R, | S, N, | S, N, | V | — | A, S |
| subunit | S, N | I, E, | G, D, | R, H | | | |
| | | V, G | R, H | | | | |
| AG(CT) | S, K, | K, R | G | R, S, | I, V | — | A, S, |
| second | A | | | T | | | T |
| subunit | | | | | | | |

TABLE 194
Center Sequence Half-Site Amino Acid Residues for TTGG
I-CreI Position

| Center Half | 48 | 50 | 71 | 72 | 73 | 73B | 74 |
|---|---|---|---|---|---|---|---|
| AC first | K | K, R | G | R, S, | I, V | — | A, S, |
| subunit | | | | T | | | T |
| AG(CT) | K | R | S, G | G | R | R or | S |
| second | | | | | | no R | |
| subunit | | | | | | | |

TABLE 195
Center Sequence Half-Site Amino Acid Residues for TCAA
I-CreI Position

| Center Half | 48 | 50 | 71 | 72 | 73 | 73B | 74 |
|---|---|---|---|---|---|---|---|
| TC first | K, N, R, | S, R | R, G, | T, S, | I, V | — | A, S |
| subunit | S, Q, H, | | S, T | R, H | | | |
| | G, A | | | | | | |
| TT(AA) | K | K, R | G | R, S, | I, V | — | A, S, |
| second | | | | T | | | T |
| subunit | | | | | | | |

TABLE 196
Center Sequence Half-Site Amino Acid Residues for GCAA
I-CreI Position

| Center Half | 48 | 50 | 71 | 72 | 73 | 73B | 74 |
|---|---|---|---|---|---|---|---|
| GC first | K | K, R | G, R, S, T, | G, N, S, | T, V | — | S |
| subunit | | | N, H | A, R, T, | | | |
| | | | | Q, M, | | | |
| | | | | P, H | | | |
| TT(AA) | K | K, R | G | R, S, T | I, V | — | A, S, T |
| second | | | | | | | |
| subunit | | | | | | | |

TABLE 197
Center Sequence Half-Site Amino Acid
Residues for GCAT I-CreI Position

| Center | | | | | | | |
|---|---|---|---|---|---|---|---|
| Half | 48 | 50 | 71 | 72 | 73 | 73B | 74 |
| GC first | K | K, R | G, R, S, | G, N, S, | T, V | — | S |
| subunit | | | T, N, H | A, R, T, | | | |
| | | | | Q, M, | | | |
| | | | | P, H | | | |
| AT(AT) | K, N, Q, | K, R | G | R | A | — | S |
| second | H, S, C, | | | | | | |
| subunit | A, G | | | | | | |

TABLE 198
Center Sequence Half-Site Amino Acid
Residues for GCGA I-CreI Position

| Center | | | | | | | |
|---|---|---|---|---|---|---|---|
| Half | 48 | 50 | 71 | 72 | 73 | 73B | 74 |
| GC first | K | K, R | G, R, S, | G, N, S, | T, V | — | S |
| subunit | | | T, N, H | A, R, T, | | | |
| | | | | Q, M, | | | |
| | | | | P, H | | | |
| GA(TC) | K, N, R, | S, R | R, G, S, T | T, S, R, | I, V | — | A, S |
| second | S, Q, H, | | | H | | | |
| subunit | G, A | | | | | | |

TABLE 199
Center Sequence Half-Site Amino Acid Residues for GCAG
I-CreI Position

| Center Half | 48 | 50 | 71 | 72 | 73 | 73B | 74 |
|---|---|---|---|---|---|---|---|
| GC | K | K, R | G, R, S, T, | G, N, S, | T, V | — | S |
| subunit | | | N, H | A, R, T, | | | |
| | | | | Q, M, | | | |
| | | | | P, H | | | |
| AG(CT) | K | C, R | S, G | N, G | R | — | S |
| second | | | | | | | |
| subunit | | | | | | | |

TABLE 200
Predicted Center Sequence Half-Site Amino Acid Residues for GTAA
I-CreI Position

| Center Half | 48 | 50 | 71 | 72 | 73 | 73B | 74 |
|---|---|---|---|---|---|---|---|
| AA (TT) | K | K, R | G | R, S, T | I, V | — | A, S, T |
| subunit | | | | | | | |

TABLE 201
Center Sequence Half-Site Amino Acid Residues for GTGA
I-CreI Position

| Center Half | 48 | 50 | 71 | 72 | 73 | 73B | 74 |
|---|---|---|---|---|---|---|---|
| TC subunit | K, N, R, | S, R | R, G, S, | T, S, R, | I, V | — | A, S |
| | S, Q, H, | | T | H | | | |
| | G, A | | | | | | |

TABLE 202
Center Sequence Half-Site Amino Acid Residues for GTGG
I-CreI Position

| Center Half | 48 | 50 | 71 | 72 | 73 | 73B | 74 |
|---|---|---|---|---|---|---|---|
| GG (CC) | K | R | D, S, G | G | R | R or | S |
| subunit | | | | | | no R | |

TABLE 203
Center Sequence Half-Site Amino Acid Residues for GTAG
I-CreI Position

| Center Half | 48 | 50 | 71 | 72 | 73 | 73B | 74 |
|---|---|---|---|---|---|---|---|
| AG (CT) | K | C, R | S, G | N, G | R | — | S |
| subunit | | | | | | | |

TABLE 204
Center Sequence Half-Site Amino Acid
Residues for GTAT I-CreI Position

| Center | | | | | | | |
|---|---|---|---|---|---|---|---|
| Half | 48 | 50 | 71 | 72 | 73 | 73B | 74 |
| AT (AT) | K, N, Q, | K, R | G | R | A | — | S |
| subunit | H, S, C, | | | | | | |
| | A, G | | | | | | |

TABLE 205
Center Sequence Half-Site Amino Acid Residues for GTGC
I-CreI Position

| Center Half | 48 | 50 | 71 | 72 | 73 | 73B | 74 |
|---|---|---|---|---|---|---|---|
| GC (GC) | K | K, R | G, R, S, | G, N, S, | T, V | — | S |
| subunit | | | T, N, H | A, R, T, | | | |
| | | | | Q, M, | | | |
| | | | | P, H | | | |

TABLE 206
Center Sequence Half-Site Amino Acid Substitutions for CCAG
I-CreI Position

| Center Half | 48 | 50 | 71 | 72 | 73 | 73B | 74 |
|---|---|---|---|---|---|---|---|
| CC | K | R | D, S, G | G | R | R or | S |
| | | | | | | no R | |
| AG(CT) | K | C, R | S, G | N, G | R | N/A | S |

TABLE 207
Center Sequence Half-Site Amino Acid Substitutions for CCGA
I-CreI Position

| Center Half | 48 | 50 | 71 | 72 | 73 | 73B | 74 |
|---|---|---|---|---|---|---|---|
| CC | K | R | D, S, G | G | R | R or | S |
| | | | | | | no R | |
| GA(TC) | K, N, R, | S, R | R, G, S, | T, S, R, | I, V | — | A, S |
| | S, Q, H, | | T | H | | | |
| | G, A | | | | | | |

TABLE 208
Center Sequence Half-Site Amino Acid Substitutions for CCGC
I-CreI Position

| Center Half | 48 | 50 | 71 | 72 | 73 | 73B | 74 |
|---|---|---|---|---|---|---|---|
| CC | K | R | D, S, G | G | R | R or | S |
| | | | | | | no R | |
| GC(GC) | K | K, R | G, R, S, | G, N, S, | T, V | — | S |
| | | | T, N, H | A, R, T, | | | |
| | | | | Q, M, | | | |
| | | | | P, H | | | |

TABLE 209
Center Sequence Half-Site Amino Acid Substitutions
for CTAA I-CreI Position

| Center | | | | | | | |
|---|---|---|---|---|---|---|---|
| Half | 48 | 50 | 71 | 72 | 73 | 73B | 74 |
| CT | K | C, R | S, G | N, G | R | — | S |
| AA(TT) | K | K, R | G | R, S, T | I, V | — | A, S, T |

TABLE 210
Center Sequence Half-Site Amino Acid Substitutions for CTGA
I-CreI Position

| Center Half | 48 | 50 | 71 | 72 | 73 | 73B | 74 |
|---|---|---|---|---|---|---|---|
| CT | K | C, R | S, G | N, G | R | — | S |
| GA(TC) | K, N, R, | S, R | R, G, S, | T, S, R, | I, V | — | A, S |
| | S, Q, H, | | T | H | | | |
| | G, A | | | | | | |

The application's sequence listing, which the Patent Office published only in electronic form, follows.

SEQUENCE LISTING (530 sequences)

SEQ ID NO: 1 - protein, 163 aa, Chlamydomonas reinhardtii
MNTKYNKEFLLYLAGFVDGDGSIIAQIKPNQSYKFKHQLSLAFQVTQKTQRRWFLDKLVDEIGVGYVRDRGSVSDYILSEIKPLHNFLTQLQPFLKLKQKQANLVLKIIWRLPSAKESPDKFLEVCTWVDQIAALNDSKTRKTTSETVRAVLDSLSEKKKSSP

SEQ ID NO: 2 - protein, 9 aa, Chlamydomonas reinhardtii
LAGLIDADG

SEQ ID NO: 3 - DNA, 22 bp, Chlamydomonas reinhardtii
caaaacgtcgtgagacagtttc

SEQ ID NO: 4 - DNA, 22 bp, Chlamydomonas reinhardtii
gttttgcagcactctgtcaaac

SEQ ID NO: 5 - DNA, 4 bp, Chlamydomonas reinhardtii
gtga

SEQ ID NO: 6 - DNA, 22 bp, Artificial Sequence
  Synthesized
gtatagcatacattatacgaag

SEQ ID NO: 7 - DNA, 22 bp, Artificial Sequence
  Synthesized
catatcgtatgtaatatgcttc

SEQ ID NO: 8 - protein, 354 aa, Artificial Sequence
  Synthesized
MNTKYNKEFLLYLAGFVDADGSIYATIAPKQQLKFKHQLQLVFVVAQKTQRRWFLDKLVDEIGVGYVHDYGRASYYRLSQIKPLHNFLTQLQPFLKLKQKQANLVLKIIEQLPSAKESPDKFLEVCTWVDQIAALNDSKTRKTTSETVRAVLDSLPGSVGGLSPSQASSAASSASSSPGSGISEALRAGAGSGTGYNKEFLLYLAGFVDGDGSICASIRPCQVAKFKHALELRFTVGQHTSRRWFLDKLVDEIGVGYVYDLSTHSQYTLSQIKPLHNFLTQLQPFLKLKQKQANLVLKIIEQLPSAKESPDKFLEVCTWVDQIAALNDSKTRKTTSETVRAVLDSLSEKKKSSP

SEQ ID NO: 9 - DNA, 22 bp, Artificial Sequence
  Synthesized
gtatagcatacaatatacgaag

SEQ ID NO: 10 - DNA, 22 bp, Artificial Sequence
  Synthesized
catatcgtatgttatatgcttc

SEQ ID NO: 11 - protein, 354 aa, Artificial Sequence
  Synthesized
MNTKYNKEFLLYLAGFVDGDGSIYATIAPKQQLKFKHQLQLVFVVAQKTCRRWFLDKLVDEIGVGYVHDYGRASYYRLSQIKPLHNFLTQLQPFLKLKQKQANLVLKIIEQLPSAKESPDKFLEVCTWVDQIAALNDSKTRKTTSETVRAVLDSLPGSVGGLSPSQASSAASSASSSPGSGISEALRAGAGSGTGYNKEFLLYLAGFVDADGSICASIRPCQVAKFKHALELRFTVGQKTCRRWFLDKLVDEIGVGYVYDLGRVTQYNLSEIKPLHNFLTQLQPFLKLKQKQANLVLKIIEQLPSAKESPDKFLEVCTWVDQIAALNDSRTRKTTSETVRAVLDSLSEKKKSSP

SEQ ID NO: 12 - protein, 354 aa, Artificial Sequence
  Synthesized
MNTKYNKEFLLYLAGFVDADGSIYATIAPKQQLKFKHQLQLVFVVAQKTRRRWFLDKLVDEIGVGYVHDYGRASYYRLSQIKPLHNFLTQLQPFLKLKQKQANLVLKIIEQLPSAKESPDKFLEVCTWVDQIAALNDSKTRKTTSETVRAVLDSLPGSVGGLSPSQASSAASSASSSPGSGISEVLRAGAGSGTGYNKEFLLYLAGFVDGDGSICASIRPCQVAKFKHALELRFTVGQTTRRRWFLDKLVDEIGVGYVYDLGRISQYNLSEIKPLHNFLTQLQPFLKLKQKQANLVLKIIEQLPSAKESPDKFLEVCTWVDQIAALNDSKTRKTTSETVRAVLDSLSEKKKSSP

SEQ ID NO: 13 - protein, 354 aa, Artificial Sequence
  Synthesized
MNTKYNKEFLLYLAGFVDADGSIYATIAPKQQLKFKHQLQLVFVVAQKTRRRWFLDKLVDEIGVGYVHDYGRASYYRLSQIKPLHNFLTQLQPFLKLKQKQANLVLKIIEQLPSAKESPDKFLEVCTWVDQIAALNDSKTRKTTSETVRAVLDSLPGSVGGLSPSQASSAASSASSSPGSGISEALRAGAGSGTGYNKEFLLYLAGFVDGDGSICASIRPCQVAKFKHALELRFTVGQSTRRRWFLDKLVDEIGVGYVYDLGTITQYNLSEIKPLHNFLTQLQPFLKLKQKQANLVLKIIEQLPSAKESPDKFLEVCTWVDQIAALNDSRTRKTTSETVRAVLDSLSEKKKSSP

SEQ ID NO: 14 - protein, 354 aa, Artificial Sequence
  Synthesized
MNTKYNKEFLLYLAGFVDGDGSIYATIAPKQQLKFKHQLQLVFVVAQKTRRRWFLDKLVDEIGVGYVHDYGRASYYRLSQIKPLHNFLTQLQPFLKLKQKQANLVLKIIEQLPSAKESPDKFLEVCTWVDQIAALNDSKTRKTTSETVRAVLDSLPGSVGGLSPSQASSAASSASSSPGSGISEALRAGAGSGTGYNKEFLLYLAGFVDADGSICASIRPCQVAKFKHALELRFTVGQSTKRRWFLDKLVDEIGVGYVYDLGNISQYNLSEIKPLHNFLTQLQPFLKLKQKQANLVLKIIEQLPSAKESPDKFLEVCTWVDQIAALNDSKTRKTTSETVRAVLDSLSEKKKSSP

SEQ ID NO: 15 - protein, 354 aa, Artificial Sequence
  Synthesized
MNTKYNKEFLLYLAGFVDGDGSIYATIAPKQQLKFKHQLQLVFVVAQKTRRRWFLDKLVDEIGVGYVHDYGRASYYRLSEIKPLHNFLTQLQPFLKLKQKQANLVLKIIEQLPSAKESPDKFLEVCTWVDQIAALNDSKTRKTTSETVRAVLDSLPGSVGGLSPSQASSAASSASSSPGSGISEALRAGAGSGTGYNKEFLLYLAGFVDADGSICASIRPCQVAKFKHALELRFTVGQATKRRWFLDKLVDEIGVGYVYDLGSVTQYNLSQIKPLHNFLTQLQPFLKLKQKQANLVLKIIEQLPSAKESPDKFLEVCTWVDQIAALNDSRTRKTTSETVRAVLDSLSEKKKSSP

SEQ ID NO: 16 - protein, 354 aa, Artificial Sequence
  Synthesized
MNTKYNKEFLLYLAGFVDGDGSIYATIAPKQQLKFKHQLQLVFVVAQKTRRRWFLDKLVDEIGVGYVHDYGRASYYRLSQIKPLHNFLTQLQPFLKLKQKQANLVLKIIEQLPSAKESPDKFLEVCTWVDQIAALNDSKTRKTTSETVRAVLDSLPGSVGGLSPSQASSAASSASSSPGSGISEALRAGAGSGTGYNKEFLLYLAGFVDADGSICASIRPCQVAKFKHALELRFTVGQKTERRWFLDKLVDEIGVGYVYDLAGISQYNLSQIKPLHNFLTQLQPFLKLKQKQANLVLKIIEQLPSAKESPDKFLEVCTWVDQIAALNDSRTRKTTSETVRAVLDSLSEKKKSSP

SEQ ID NO: 17 - protein, 354 aa, Artificial Sequence
  Synthesized
MNTKYNKEFLLYLAGFVDGDGSIYATIAPKQQLKFKHQLQLVFVVAQKTCRRWFLDKLVDEIGVGYVHDYRQCSYYRLSEIKPLHNFLTQLQPFLKLKQKQANLVLKIIEQLPSAKESPDKFLEVCTWVDQIAALNDSKTRKTTSETVRAVLDSLPGSVGGLSPSQASSAASSASSSPGSGISEALRAGAGSGTGYNKEFLLYLAGFVDADGSICASIRPCQVAKFKHALELRFTVGQSTCRRWFLDKLVDEIGVGYVYDLGSVSQYNLSQIKPLHNFLTQLQPFLKLKQKQANLVLKIIEQLPSAKESPDKFLEVCTWVDQIAALNDSRTRKTTSETVRAVLDSLSEKKKSSP

SEQ ID NO: 18 - protein, 354 aa, Artificial Sequence
  Synthesized
MNTKYNKEFLLYLAGFVDADGSIYATIAPKQQLKFKHQLQLVFVVAQKTRRRWFLDKLVDEIGVGYVHDYGRASYYRLSQIKPLHNFLTQLQPFLKLKQKQANLVLKIIEQLPSAKESPDKFLEVCTWVDQIAALNDSKTRKTTSETVRAVLDSLPGSVGGLSPSQASSAASSASSSPGSGISEALRAGAGSGTGYNKEFLLYLAGFVDGDGSICASIRPCQVAKFKHALELRFTVGQATRRRWFLDKLVDEIGVGYVYDLGRISQYNLSEIKPLHNFLTQLQPFLKLKQKQANLVLKIIEQLPSAKESPDKFLEVCTWVDQIAALNDSKTRKTTSETVRAVLDSLSEKKKSSP

SEQ ID NO: 19 - protein, 354 aa, Artificial Sequence
  Synthesized
MNTKYNKEFLLYLAGFVDADGSIYATIAPKQQLKFKHQLQLVFVVAQKTRRRWFLDKLVDEIGVGYVHDYGRASYYRLSQIKPLHNFLTQLQPFLKLKQKQANLVLKIIEQLPSAKESPDKFLEVCTWVDQIAALNDSKTRKTTSETVRAVLDSLPGSVGGLSPSQASSAASSASSSPGSGISEALRAGAGSGTGYNKEFLLYLAGFVDGDGSICASIRPCQVAKFKHALELRFTVGQSTERRWFLDKLVDEIGVGYVYDLGRIAQYNLSQIKPLHNFLTQLQPFLKLKQKQANLVLKIIEQLPSAKESPDKFLEVCTWVDQIAALNDSKTRKTTSETVRAVLDSLSEKKKSSP

SEQ ID NO: 20 - protein, 354 aa, Artificial Sequence
  Synthesized
MNTKYNKEFLLYLAGFVDGDGSIYATIAPKQQLKFKHQLQLVFVVAQKTRRRWFLDKLVDEIGVGYVHDYGRASYYRLSQIKPLHNFLTQLQPFLKLKQKQANLVLKIIEQLPSAKESPDKFLEVCTWVDQIAALNDSKTRKTTSETVRAVLDGLPGSVGGLSPSQASSAASSASSSPGSGISEALRAGAGSGTGYNKEFLLYLAGFVDADGSICASIRPCQVAKFKHALELRFTVGQSTTRRWFLDKLVDEIGVGYVYDLGRISQYNLSEIKPLHNFLTQLQPFLKLKQKQANLVLKIIEQLPSAKESPDKFLEVCTWVDQIAALNDSRTRKTTSETVRAVLDSLSEKKKSSP

SEQ ID NO: 21 - protein, 354 aa, Artificial Sequence
  Synthesized
MNTKYNKEFLLYLAGFVDGDGSIYATIAPKQQLKFKHQLQLVFVVAQKTTRRWFLDKLVDEIGVGYVHDYGRASYYRLSQIKPLHNFLTQLQPFLKLKQKQANLVLKIIEQLPSAKESPDKFLEVCTWVDQIAALNDSKTRKTTSETVRAVLDSLPGSVGGLSPSQASSAASSASSSPGSGISEALRAGAGSGTGYNKEFLLYLAGFVDADGSICASIRPCQVAKFKHALELRFTVGQSTKRRWFLDKLVDEIGVGYVYDLGRVAQYNLSEIKPLHNFLTQLRPFLKLKQKQANLVLKIIEQLPSAKESPDKFLEVCTWVDQIAALNDSRTRKTTSETVRAVLDSLSEKKKSSP

SEQ ID NO: 22 - protein, 354 aa, Artificial Sequence
  Synthesized
MNTKYNKEFLLYLAGFVDGDGSIYATIAPKQQLKFKHQLQLVFVVAQKTRRRWFLDKLVDEIGVGYVHDYGRASYYRLSQIKPLHNFLTQLQPFLKLKQKQANLVLKIIEQLPSAKESPDKFLEVCTWVDQIAALNDSKTRKTTSETVRAVLDSLPGSVGGLSPSQASSAASSASSSPGSGISEALRAGAGSGTGYNKEFLLYLAGFVDADGSICASIRPCQVAKFKHALELRFTVGQSTKRRWFLDKLVDEIGVGYVYDLGSISQYNLSEIKPLHNFLTQLQPFLKLKQKQANLVLKIIEQLPSAKESPDKFLEVCTWVDQIAALNDSRTRKTTSETVRAVLDSLSEKKKSSP

SEQ ID NO: 23 - protein, 354 aa, Artificial Sequence
  Synthesized
MNTKYNKEFLLYLAGFVDGDGSIYATIAPKQQLKFKHQLQLVFVVAQKTTRRWFLDKLVDEIGVGYVHDYGRASYYRLSQIKPLHNFLTQLQPFLKLKQKQANLVLKIIEQLPSAKESPDKFLEVCTWVDQIAALNDSKTRKTTSETVRAVLDSLPGSVGGLSPSQASSAASSASSSPGSGISEALRAGAGSGTGYNKEFLLYLAGFVDADGSICASIRPCQVAKFKHALELRFTVGQATERRWFLDKLVDEIGVGYVYDLGRIAQYNLSQIKPLHNFLTQLQPFLKLKQKQANLVLKIIEQLPSAKESPDKFLEVCTWVDQIAALNDSRTRKTTSETVRAVLDSLSEKKKSSP

SEQ ID NO: 24 - protein, 354 aa, Artificial Sequence
  Synthesized
MNTKYNKEFLLYLAGFVDGDGSIYATIAPKQQLKFKHQLQLVFVVAQKTRRRWFLDKLVDEIGVGYVHDYGRASYYRLSQIKPLHNFLTQLQPFLKLKQKQANLVLKIIEQLPSAKESPDKFLEVCTWVDQIAALNDSKTRKTTSETVRAVLDSLPGSVGGLSPSQASSAASSASSSPGSGISEALRAGAGSGTGYNKEFLLYLAGFVDSDGSICASIRPCQVAKFKHALELRFTVGQSTKRRWFLDKLVDEIGVGYVYDLGRIAQYNLSEIKPLHNFLTQLQPFLKLKQKQANLVLKIIEQLPSAKESPDKFLEVCTWVDQIAALNDSRTRKTTSETVRAVLDSLSEKKKSSP

SEQ ID NO: 25 - protein, 354 aa, Artificial Sequence
  Synthesized
MNTKYNKEFLLYLAGFVDGDGSIYATIAPKQQLKFKHQLQLVFVVAQKTKRRWFLDKLVDEIGVGYVHDYGRASYYRLSEIKPLHNFLTQLQPFLKLKQKQANLVLKIIEQLPSAKESPDKFLEVCTWVDQIAALNDSKTRKTTSETVRAVLDSLPGSVGGLSPSQASSAASSASSSPGSGISEALRAGAGSGTGYNKEFLLYLAGFVDADGSICASIRPCQVAKFKHALELRFTVGQSTRRRWFLDKLVDEIGVGYVYDLGAISQYNLSEIKPLHNFLTQLQPFLKLKQKQANLVLKIIEQLPSAKGSPDKFLEVCTWVDQIAALNDSKTRKTTSETVRAVLDSLSEKKKSSP

SEQ ID NO: 26 - protein, 354 aa, Artificial Sequence
  Synthesized
MNTKYNKEFLLYLAGFVDADGSIYATIAPKQQLKFKHQLQLVFVVAQKTCRRWFLDKLVDEIGVGYVHDYGRASYYRLSQIKPLHNFLTQLQPFLKLKQKQANLVLKIIEQLPSAKESPDKFLEVCTWVDQIAALNDSKTRKTTSETVRAVLDSLPGSVGGLSPSQASSAASSASSSPGSGISEALRAGAGSGTGYNKEFLLYLAGFVDGDGSICASIRPCQVAKFKHALELRFTVGQATRRRWFLDKLVDEIGVGYVYDLGRISQYNLSEIKPLHNFLTQLQPFLKLKQKQANLVLKIIEQLPSAKESPDKFLEVCTWVDQIAALNDSRTRKTTSETVRAVLDSLSEKKKSSP

SEQ ID NO: 27 - protein, 354 aa, Artificial Sequence
  Synthesized
MNTKYNKEFLLYLAGFVDADGSIYATIAPKQQLKFKHQLQLVFVVAQKTRRRWFLDKLVDEIGVGYVHDYGRASYYRLSQIKPLHNFLTQLQPFLKLKQKQANLVLKIIEQLPSAKESPDKFLEVCTWVDQIAALNDSKTRKTTSETVRAVLDSLPGSVGGLSPSQASSAASSASSSPGSGISEALRAGAGSGTGYNKEFLLYLAGFVDGDGSICASIRPCQVAKFKHALELRFTVGQSTKRRWFLDKLVDEIGVGCVYDLGTITQYNLSEIKPLHNFLTQLQPFLKLKQKQANLVLKIIEQLPSAKESPDKFLEVCTWVDQIAALNDSRTRKTTSETVRAVLDSLSEKKKSSP

SEQ ID NO: 28 - protein, 354 aa, Artificial Sequence
  Synthesized
MNTKYNKEFLLYLAGFVDADGSIYATIAPKQQLKFKHQLQLVFVVAQKTCRRWFLDKLVDEIGVGYVHDYGRASYYRLSQIKPLHNFLTQLQPFLKLKQKQANLVLKIIEQLPSAKESPDKFLEVCTWVDQIAALNDSKTRKTTSETVRAVLDSLPGSVGGLSPSQASSAASSASSSPGSGISEALRAGAGSGTGYNKEFLLYLAGFVDGDGSICASIRPCQVAKFKHALELRFTVGQKTERRWFLDKLVDEIGVGYVYDLGSVSQYNLSEIKPLHNFLTQLQPFLKLKQKQANLVLKIIEQLPSAKESPDKFLEVCTWVDQIAALNDSRTRKTTSETVRAVLDSLSEKKKSSP

SEQ ID NO: 29 - protein, 354 aa, Artificial Sequence
  Synthesized
MNTKYNKEFLLYLAGFVDGDGSIYATIAPKQQLKFKHQLQLVFVVAQKTSRRWFLDKLVDEIGVGYVHDYGRASYYRLSQIKPLHNFLTQLQPFLKLKQKQANLVLKIIEQLPSAKESPDKFLEVCTWVDQIAALNDSKTRKTTSETVRAVLDSLPGSVGGLSPSQASSAASSASSSPGSGISEALRAGAGSGTGYNKEFLLYLAGFVDADGSICASIRPCQVAKFKHALELRFTVGQSTKRRWFLDKLVDEIGVGYVYDLGRITQYNLSQIKPLHNFLTQLQPFLKLKQKQANLVLKIIEQLPSAKESPDKFLEVCTWVDQIAALNDSRTRKTTSETVRAVLDSLSEKKKSSP

SEQ ID NO: 30 - protein, 354 aa, Artificial Sequence
  Synthesized
MNTKYNKEFLLYLAGFVDGDGSIYATIAPKQQLKFKHQLQLVFVVAQKTRRRWFLDKLVDEIGVGYVHDYGRASYYRLSQIKPLHNFLTQLQPFLKLKQKQANLVLKIIEQLPSAKESPDKFLEVCTWVDQIAALNDSKTRKTTSETVRAVLDSLPGSVGGLSPSQASSAASSASSSPGSGISEALRAGAGSGTGYNKEFLLYLAGFVDADGSICASIRPCQVAKFKHALELRFTVGQATKRRWFLDKLVDEIGVGYVYDLGPIAQYNLSEIKPLHNFLTQLQPFLKLKQKQANLVLKIIEQLPSAKESPDKFLEVCTWVDQIAALNDSRTRKTTSETVRAVLDSLSEKKKSSP

SEQ ID NO: 31 - protein, 354 aa, Artificial Sequence
  Synthesized
MNTKYNKEFLLYLAGFVDADGSIYATIAPKQQLKFKHQLQLVFVVAQKTRRRWFLDKLVDEIGVGYVHDYGRASYYRLSQIKPLHNFLTQLQPFLKLKQKQANLVLKIIEQLPSAKESPDKFLEVCTWVDQIAALNDSRTRKTTSETVRAVLDSLPGSVGGLSPSQASSAASSASSSPGSGISEALRAGAGSGTGYNKEFLLYLAGFVDGDGSICASIRPCQVAKFKHALELRFTVGQSTRRRWFLDKLVDEIGVGYVYDLGRIAQYNLSEIKPLHNFLTQLQPFLKLKQKQANLVLKIIEQLPSAKESPDKFLEVCTWVDQIAALNDSRTRKTTSETVRAVLDSLSEKKKSSP

SEQ ID NO: 32 - protein, 354 aa, Artificial Sequence
  Synthesized
MNTKYNKEFLLYLAGFVDADGSIYATIAPKQQLKFKHQLQLVFVVAQLTRRRWFLDKLVDEIGVGYVHDYGRASYYRLSQIKPLHNFLTQLQPFLKLKQKQANLVLKIIEQLPSAKESPDKFLEVCTWVDQIAALNDSKTRKTTSETVRAVLDSLPGSVGGLSPSQASSAASSASSSPGSGISEALRAGAGSGTGYNKEFLLYLAGFVDGDGSICASIRPCQVAKFKHALELRFTVGQATKRRWFLDKLVDEIGVGYVYDLGRVSQYNLSEIKPLHNFLTQLQPFLKLKQKQANLVLKIIEQLPSAKESPDKFLEVCTWVDQIAALNDSKTRKTTSETVRAVLDSLSEKKKSSP

SEQ ID NO: 33 - protein, 354 aa, Artificial Sequence
  Synthesized
MNTKYNKEFLLYLAGFVDGDGSIYATIAPKQQLKFKHQLQLVFVVAQKTRRRWFLDKLVDEIGVGYVHDYGRASYYRLSQIKPLHNFLTQLQPFLKLKQKQANLVLKIIEQLPSAKESPDKFLEVCTWVDQIAALNDSKTRKTTSETVRAVLDSLPGSVGGLSPSQASSAASSASSSPGSGISEALRAGAGSGTGYNKEFLLYLAGFVDADGSICASIRPCQVAKFKHALELRFTVGQTTKRRWFLDKLVDEIGVGYVYDLGPVAQYNLSQIKPLHNFLTQLQPFLKLKQKQANLVLKIIEQLPSAKESPDKFLEVCTWVDQIAALNDSRTRKTTSETVRAVLDSLSEKKKSSP

SEQ ID NO: 34 - DNA, 22 bp, Artificial Sequence
  Synthesized
gtatagcatacagtatacgaag

SEQ ID NO: 35 - DNA, 22 bp, Artificial Sequence
  Synthesized
catatcgtatgtcatatgcttc

SEQ ID NO: 36 - protein, 354 aa, Artificial Sequence
  Synthesized
MNTKYNKEFLLYLAGFVDADGSIYATIAPKQQLKFKHQLQLVFVVAQKTRRRWILDKLVDEIGVGYVHDYGKASYYRLSEIKPLHNFLTQLQPFLKLKQKQANLVLKIIEQLPSAKESPDKFLEVCTWVDQIAALNDSKTRKTTSETVRAVLDSLPGSVGGLSPSQASSAASSASSSPGSGISEALRAGAGSGTGYNKEFLLYLAGFVDGDGSICASIRPCQVAKFKHALELRFTVGQKTCRRWFLDKLVDEIGVGYVYDLGGRSQYNLSQIKPLHNFLTQLQPFLKLKQKQANLVLKIIEQLPSAKESPDKFLEVCTWVDQIAALNDSKTRKTTSETVRAVLDSLSEKKKSSP

SEQ ID NO: 37 - protein, 354 aa, Artificial Sequence
  Synthesized
MNTKYNKEFLLYLAGFVDADGSIYATIAPKQQLKFKHQLQLVFVVAQKTRRRWLLDKLVDEIGVGYVHDYRQCSYYRLSEIKPLHNFLTQLQPFLKLKQKQANLVLKIIEQLPSAKESPDKFLEVCTWVDQIAALNDSKTRKTTSETVRAVLDSLPGSVGGLSPSQASSAASSASSSPGSGISEALRAGAGSGTGYNKEFLLYLAGFVDGDGSICASIRPCQVAKFKHALELRFTVGQKTCRRWFLDKLVDEIGVGYVYDLGGRSQYNLSQIKPLHNFLTQLQPFLKLKQKQANLVLKIIEQLPSAKESPDKFLEVCTWVDQIAALNDSRTRKTTSETVRAVLDSLSEKKKSSP

SEQ ID NO: 38 - protein, 354 aa, Artificial Sequence
  Synthesized
MNTKYNKEFLLYLAGFVDADGSIYATIAPKQQLKFKHQLQLVFVVAQKTRRRWILDKLVDEIGVGYVHDYGRASYYRLSQIKPLHNFLTQLQPFLKLKQKQANLVLKIIEQLPSAKESPDKFLEVCTWVDQIAALNDSKTRKTTSETVRAVLDSLPGSVGGLSPSQASSAASSASSSPGSGISEALRAGAGSGTGYNKEFLLYLAGFVDGDGSICASIRPCQVAKFKHALELRFTVGQKTCRRWFLDKLVDEIGVGYVYDLGGRSQYNLSQIKPLHNFLTQLQPFLKLKQKQANLVLKIIEQLPSAKESPDKFLEVCTWVDQIAALNDSRTRKTTSETVRAVLDSLSEKKKSSP

SEQ ID NO: 39 - protein, 355 aa, Artificial Sequence
  Synthesized
MNTKYNKEFLLYLAGFVDADGSIYATIAPKQQLKFKHQLQLVFVVAQKTRRRWFLDKLVDEIGVGYVHDYGRASYYRLSQIKPLHNFLTQLQPFLKLKQKQANLVLKIIEQLPSAKESPDKFLEVCTWVDQIAALNDSKTRKTTSETVRAVLDSLPGSVGGLSPSQASSAASSASSSPGSGISEALRAGAGSGTGYNKEFLLYLAGFVDGDGSICASIRPCQVAKFKHALELRFTVGQKTCRRWFLDKLVDEIGVGYVYDLDDRRSQYNLSQIKPLHNFLTQLQPFLKLKQKQANLVLKIIEQLPSAKESPDKFLEVCTWVDQIAALNDSKTRKTTSETVRAVLDSLSEKKKSSP

SEQ ID NO: 40 - protein, 355 aa, Artificial Sequence
  Synthesized
MNTKYNKEFLLYLAGFVDGDGSIYATIAPKQQLKFKHQLQLVFVVAQKTRRRWFLDKLVDEIGVGYVHDYGRASYYRLSQIKPLHNFLTQLQPFLKLKQKQANLVLKIIEQLPSAKESPDKFLEVCTWVDQIAALNDSKTRKTTSETVRAVLDSLPGSVGGLSPSQASSAASSASSSPGSGISEALRAGAGSGTGYNKEFLLYLAGFVDADGSICASIRPCQVAKFKHALELRFTVGQKTCRRWFLDKLVDEIGVGYVYDLDSRRSQYNLSQIKPLHNFLTQLQPFLKLKQKQANLVLKIIEQLPSAKESPDKFLEVCTWVDQIAALNDSRTRKTTSETVRAVLDSLSEKKKSSP

SEQ ID NO: 41 - protein, 354 aa, Artificial Sequence
  Synthesized
MNTKYNKEFLLYLAGFVDGDGSIYATIAPKQQLKFKHQLQLVFVVAQKTRRRWFLDKLVDEIGVGYVHDYGPASYYRLSEIKPLHNFLTQLQPFLKLKQKQANLVLKIIEQLPSAKESPDKFLEVCTWVDQIAALNDSKTRKTTSETVRAVLDSLPGPVGGLSPSQASSAASSASSSPGSGISEALRAGAGSGTGYNKEFLLYLAGFVDSDGSICASIRPCQVAKFKHALELRFTVGQKTCRRWFLDKLADEIGVGHVYDLGGRSQYNLSQIKPLHNFLTQLQPFLKLKQKQANLVLKIIEQLPSAKESPDKFLEVCTWVDQIAALNDSRTRKTTSETVRAVLDSLSEKKKSSP

SEQ ID NO: 42 - protein, 354 aa, Artificial Sequence
  Synthesized
MNTKYNKEFLLYLAGFVDADGSIYATIAPKQQLKFKHQLQLVFVVAQKTRRRWFLDKLVDEIGVGYVHDYGTCSYYRLSQIKPLHNFLTQLQPFLKLKQKQANLVLKIIEQLPSAKESPDKFLEVCTWVDQIAALNDSKTRKTTSETVRAVLDSLPGSVGGLSPSQASSAASSASSSPGSGISEALRAGAGSGTGYNKEFLLYLAGFVDGDGSICASIRPCQVAKFKHALELRFTVGQKTCRRWFLDKLVDEIGVGYVYDLGGRSQYNLSQIKPLHNFLTQLQPFLKLKQKQANLVLKIIEQLPSAKESPDKFLEVCTWVDQIAALNDSRTRKTTSETVRAVLDSLSEKKKSSP

SEQ ID NO: 43 - protein, 354 aa, Artificial Sequence
  Synthesized
MNTKYNKEFLLYLAGFVDADGSIYATIAPKQQLKFKHQLQLVFVVAQKTRRRWFLDKLVDEIGVGYVHDYGPASYYRLSQIKPLHNFLTQLQPFLKLKQKQANLVLKIIEQLPSAKESPDKFLEVCTWVDQIAALNDSKTRKTTSETVRAVLDSLPGSVGGLSPSQASSAASSASSSPGSGISEALRAGAGSGTGYNKEFLLYLAGFVDGDGSICASIRPCQVAKFKHALELRFTVGQKTCRRWFLDKLVDEIGVGYVYDLGGRSQYNLSQTKPLHNFLTQLQPFLKLKQKQANLVLKIIEQLPSAKESPDKFLEVCTWVDQIAALNDSKTRKTTSETVRAVLDSLSEKKKSSP

SEQ ID NO: 44 - DNA, 22 bp, Artificial Sequence
  Synthesized
gtatagcatacattatacgaag

SEQ ID NO: 45 - DNA, 22 bp, Artificial Sequence
  Synthesized
catatcgtatgtaatatgcttc

SEQ ID NO: 46 - protein, 354 aa, Artificial Sequence
  Synthesized
MNTKYNKEFLLYLAGFVDGDGSIYATIAPKQQLKFKHQLQLVFVVAQKTSRRWFLDKLVDEIGVGYVHDYRTASYYRLSEIKPLHNFLTQLQPFLKLKQKQANLVLKIIEQLPSAKESPDKFLEVCTWVDQIAALNDSHTRKTTSETVRAVLDSLPGSVGGLSPSQASSAASSASSSPGSGISEALRAGAGSGTGYNKEFLLYLAGFVDADGSICASIRPCQVAKFKHALELRFTVGQHTKRRWFLDKLVDEIGVGYVYDLGKACQYNLSQIKPLHNFLTQLQPFLKLKQKQANLVLKIIEQLPSAKESPDKFLEVCTWVDQIAALNDSRTRKTTSETVRAVLDSLSEKKKSSP

SEQ ID NO: 47 - protein, 354 aa, Artificial Sequence
  Synthesized
MNTKYNKEFLLYLAGFVDADGSIYATIAPKQQLKFKHQLQLVFVVAQSTRRRWFLDKLVDEIGVGYVHDYGRASYYRLSQIKPLHNFLTQLQPFLKLKQKQANLVLKIIEQLPSAKESPDKFLEVCTWVDQIAALNDSKTRKTTSETVRAVLDSLPGSVGGLSPSQASSAASSASSSPGSGISEALRAGAGSGTGYNKEFLLYLAGFVDGDGSICASIRPCQVAKFKHALELRFTVGQHTCRRWFLDKLVDEIGVGYVYDLGAASQYNLSQIKPLHNFLTQLQPFLKLKQKQANLVLKIIEQLPSAKESPDKFLEVCTWVDQIAALNDSKTRKTTSETVRAVLDSLSEKKKSSP

SEQ ID NO: 48 - protein, 354 aa, Artificial Sequence
  Synthesized
MNTKYNKEFLLYLAGFVDADGSIYATIAPKQQLKFKHQLQLVFVVAQKTSRRWFLDKLVDEIGVGYVHDYGRASYYRLSQIKPLHNFLTQLQPFLKLKQKQANLVLKIIEQLPSAKESPDKFLEVCTWVDQIAALNDSKTRKTTSETVRAVLDSLPGSVGGLSPSQASSAASSASSSPGSGISEALRAGAGSGTGYNKEFLLYLAGFVDGDGSICASIRPCQVAKFKHALELRFTVGQHTNRRWFLDKLVDEIGVGYVYDLRSCCQYNLSQTKPLHNFLTQLQPFLKLKQKQANLVLKIIEQLPSAKESPDKFLEVCTWVDQIAALNDSRTRKTTSETVRAVLDSLSEKKKSSP

SEQ ID NO: 49 - protein, 354 aa, Artificial Sequence
  Synthesized
MNTKYNKEFLLYLAGFVDADGSIYATIAPKQQLKFKHQLQLVFVVAQKTRRRWFLDKLVDEIGVGYVHDYGRASYYRLSQIKPLHNFLTQLQPFLKLKQKQANLVLKIIEQLPSAKESPDKFLEVCTWVDQIAALNDSKTRKTTSETVRAVLDSLPGSVGGLSPSQASSAASSASSSPGSGISEALRAGAGSGTGYNKEFLLYLAGFVDGDGSICASIRPCQVAKFKHALELRFTVGQHTRRRWFLDKLVDEIGVGYVYDLTRCCQYNLSEIKPLHNFLTQLQPFLKLKQKQANLVLKIIEQLPSAKESPDKFLEVCTWVDQIAALNDSRTRKTTSETVRAVLDSLSEKKKSSP

SEQ ID NO: 50 - protein, 354 aa, Artificial Sequence
  Synthesized
MNTKYNKEFLLYLAGFVDGDGSIYATIAPKQQLKFKHQLQLVFVVAQITRRRWFLDKLVDEIGVGYVHDYGRASYYRLSQIKPLHNFLTQLQPFLKLKQKQANLVLKIIEQLPSAKESPDKFLEVCTWVDQIAALNDSKTRKTTSETVRAVLDSLPGSVGGLSPSQASSAASSASSSPGSGISEALRAGAGSGTGYNKEFLLYLAGFVDGDGSICASIRPCQVAKFKHALELRFTVGQTTKRRWFLDKLVDEIGVGYVYDLGHASQYNLSQIKPLHNFLTQLQPFLKLKQKQANLVLKIIEQLPSAKESPDKFLEVCTWVDQIAALNDSKTRKTTSETVRAVLDSLSEKKKSSP

SEQ ID NO: 51 - protein, 354 aa, Artificial Sequence
  Synthesized
MNTKYNKEFLLYLAGFVDGDGSIYATIAPKQQLKFKHQLQLVFVVAQKTKRRWFLDKLVDEIGVGYVHDYGRASYYRLSQIKPLHNFLTQLQPFLKLKQKQANLVLKIIEQLPSAKESPDKFLEVCTWVDQIAALNDSKTRKTTSETVRAVLDSLPGSVGGLSPSQASSAASSASSSPGSGISEALRAGAGSGTGYNKEFLLYLAGFVDADGSICASIRPCQVAKFKHALELRFTVGQHTKRRWFLDKLVDEIGVGYVYDLKHCCQYNLSEIKPLHNFLTQLQPFLKLKQKQANLVLKIIEQLPSAKESPDKFLEVCTWVDQIAALNDSKTRKTTSETVRAVLDSLSEKKKSSP

SEQ ID NO: 52 - protein, 354 aa, Artificial Sequence
  Synthesized
MNTKYNKEFLLYLAGFVDADGSIYATIAPKQQLKFKHQLQLVFVVAQKTRRRWFLDKLVDEIGVGYVHDYGRASYYRLSQIKPLHNFLTQLQPFLKLKQKQANLVLKIIEQLPSAKESPDKFLEVCTWVDQIAALNDSKTRKTTSETVRAVLDSLPGSVGGLSPSQASSAASSASSSPGSGISEALRAGAGSGTGYNKEFLLYLAGFVDGDGSICASIRPCQVAKFKHALELRFTVGQGTKRRWFLDKLVDEIGVGYVYDLGKACQYNLSEIKPLHNFLTQLQPFLKLKQKQANLVLKIIEQLPSAKESPDKFLEVCTWVDQIAALNDSKTRKTTSETVRAVLDSLSEKKKSSP

SEQ ID NO: 53 - protein, 354 aa, Artificial Sequence
  Synthesized
MNTKYNKEFLLYLAGFVDGDGSIYATIAPKQQLKFKHQLQLVFVVAQKTRRRWFLDKLVDEIGVGYVHDYGRASYYRLSQIKPLHNFLTQLQPFLKLKQKQANLVLKIIEQLPSAKESPDKFLEVCTWVDQIAALNDSKTRKTTSETVRAVLDSLPGSVGGLSPSQASSAASSASSSPGSGISEALRAGAGSGTGYNKEFLLYLAGFVDADGSICASIRPCQVAKFKHALELRFTVGQATKRRWFLDKLVDEIGVGYVYDLRHSCQYNLSQIKPLHNFLTQLQPFLKLKQKQANLVLKIIEQLPSAKESPDKFLEVCTWVDQIAALNDSRTRKTTSETVRAVLDSLSEKKKSSP

SEQ ID NO: 54 - protein, 354 aa, Artificial Sequence
  Synthesized
MNTKYNKEFLLYLAGFVDADGSIYATIAPKQQLKFKHQLQLVFVVAQKTRRRWFLDKLVDEIGVGYVHDYGRASYYRLSQIKPLHNFLTQLQPFLKLKQKQANLVLKIIEQLPSAKESPDKFLEVCTWVDQIAALNDSKTRKTTSETVRAVLDSLPGSVGGLSPSQASSAASSASSSPGSGISEALRAGAGSGTGYNKEFLLYLAGFVDGDGSICASIRPCQVAKFKHALELRFTVGQHTKRRWFLDKLVDEIGVGYVYDLTKCCQYNLSQIKPLHNFLTQLQPFLKLKQKQANLVLKIIEQLPSAKESPDKFLEVCTWVDQIAALNDSTTRKTTSETVRAVLDSLSEKKKSSP

SEQ ID NO: 55 - protein, 354 aa, Artificial Sequence
  Synthesized
MNTKYNKEFLLYLAGFVDGDGSIYATIAPKQQLKFKHQLQLVFVVAQKTRRRWFLDKLVDEIGVGYVHDYGRASYYRLSQIKPLHNFLTQLQPFLKLKQKQANLVLKIIEQLPSAKESPDKFLEVCTWVDQIAALNDSKTRKTTSETVRAVLDSLPGSVGGLSPSQASSAASSASSSPGSGISEALRAGAGSGTGYNKEFLLYLAGFVDADGSICASIRPCQVAKFKHALELRFTVGQSTCRRWFLDKLVDEIGVGYVYDLGTACQYNLSQIKHLHNFLTQLQPFLKLKQKQANLVLKIIEQLPSAKGSPDKFLEVCTWVDQIAALNDSTTRKTTSETVRAVLDSLSEKKKSSP

SEQ ID NO: 56 - protein, 354 aa, Artificial Sequence; identical to SEQ ID NO: 8
  Synthesized

SEQ ID NO: 57 - protein, 354 aa, Artificial Sequence
  Synthesized
MNTKYNKEFLLYLAGFVDGDGSIYATIAPKQQLKFKHQLQLVFVVAQLTKRRWFLDKLVDEIGVGYVHDYGRASYYRLSQIKPLHNFLTQLQPFLKLKQKQANLVLKIIEQLPSAKESPDKFLEVCTWVDQIAALNDSKTRKTTSETVRAVLDSLPGSVGGLSPSQASSAASSASSSPGSGISEALRAGAGSGTGYNKEFLLYLAGFVDADGSICASIRPCQVAKFKHALELRFTVGQHTKRRWFLDKLVDEIGVGYVYDLKACAQYNLSEIKPLHNFLTQLQPFLKLKQKQANLVLKIIEQLPSAKESPDKFLEVCTWVDQIAALNDSKTRKTTSETVRAVLDSLSEKKKSSP

SEQ ID NO: 58 - protein, 354 aa, Artificial Sequence
  Synthesized
MNTKYNKEFLLYLAGFVDGDGSIYATIAPKQQLKFKHQLQLVFVVAQKTRRRWFLDKLVDEIGVGYVHDYGRASYYRLSQIKPLHNFLTQLQPFLKLKQKQANLVLKIIEQLPSAKESPDKFLEVCTWVDQIAALNDSKTRKTTSETVRAVLDSLPGSVGGLSPSQASSAASSASSSPGSGISEALRAGAGSGTGYNKEFLLYLAGFVDADGSICASIRPCQVAKFKHALELRFTVGQHTGRRWFLDKLVDEIGVGYVYDLGRGCQYNLSQIKPLHNFLTQLQPFLKLKQKQANLVLKIIEQLPSAKESPDKFLEVCTWVDQIAALNDSKTRKTTSETVRAVLDSLSEKKKSSP

SEQ ID NO: 59 - protein, 354 aa, Artificial Sequence
  Synthesized
MNTKYNKEFLLYLAGFVDADGSIYATIAPKQQLKFKHQLQLVFVVAQKTRRRWFLDKLVDEIGVGYVHDYGRASYYRLSQIKPLHNFLTQLQPFLKLKQKQANLVLKIIEQLPSAKESPDKFLEVCTWVDQIAALNDSKTRKTTSETVRAVLDSLPGSVGGLSPSQASSAASSASSSPGSGISEALRAGAGSGTGYNKEFLLYLAGFVDGDGSICASIRPCQVAKFKHALELRFTVGQSTKRRWFLDKLVDEIGVGYVYDLRGGCQYNLSQIKPLHNFLTQLQPFLKLKQKQANLVLKIIEQLPSAKESPDKFLEVCTWVDQIAALNDSKTRKTTSETVRAVLDSLSEKKKSSP

SEQ ID NO: 60 - protein, 354 aa, Artificial Sequence
  Synthesized
MNTKYNKEFLLYLAGFVDGDGSIYATIAPKQQLKFKHQLQLVFVVAQKTRRRWFLDKLVDEIGVGYVHDYGRASYYRLSEIKPLHNFLTQLQPFLKLKQKQANLVLKIIEQLPSAKESPDKFLEVCTWVDQIAALNDSKTRKTTSETVRAVLDSLPGSVGGLSPSQASSAASSASSSPGSGISEALRAGAGSGTGYNKEFLLYLAGFVDSDGSICASIRPCQVAKFKHALELRFTVGQATSRRWFLDKLVDEIGVGYVYDLGRACQYNLSQIKPLHNFLTQLQPFLKLKQKQANLVLKIIEQLPSAKESPDKFLEVCTWVDQIAALNDSRTRKTTSETVRAVLDSLSEKKKSSP

SEQ ID NO: 61 - protein, 354 aa, Artificial Sequence
  Synthesized
MNTKYNKEFLLYLAGFVDADGSIYATIAPKQQLKFKHQLQLVFVVAQLTKRRWFLDKLVDEIGVGYVHDYGRASYYRLSQIKPLHNFLTQLQPFLKLKQKQANLVLKIIEQLPSAKESPDKFLEVCTWVDQIAALNDSKTRKTTSETVRAVLDSLPGSVGGLSPSQASSAASSASSSPGSGISEALRAGAGSGTGYNKEFLLYLAGFVDGDGSICASIRPCQVAKFKHALELRFTVGQATKRRWFLDKLVDEIGVGYVYDLRSCCQYNLSQIKPLHNFLTQLQPFLKLKQKQANLVLKIIEQLPSAKESPDKFLEVCTWVDQIAALNDSKTRKTTSETVRAVLDSLSEKKKSSP

SEQ ID NO: 62 - protein, 354 aa, Artificial Sequence
  Synthesized
MNTKYNKEFLLYLAGFVDADGSIYATIAPKQQLKFKHQLQLVFVVAQKTRRRWFLDKLVDEIGVGYVHDYGRASYYRLSQIKPLHNFLTQLQPFLKLKQKQANLVLKIIEQLPSAKESPDKFLEVCTWVDQIAALNDSKTRKTTSETVRAVLDSLPGSVGGLSPSQASSAASSASSSPGSGISEALRAGAGSGTGYNKEFLLYLAGFVDGDGSICASIRPCQVAKFKHALELRFTVGQATQRRWFLDKLVDEIGVGYVYDLKSGCQYNLSQIKPLHNFLTQLQPFLKLKQKQANLVLKIIEQLPSAKESPDKFLEVCTWVDQIAALNDSKTRKTTSETVRAVLDSLSEKKKSSP

SEQ ID NO: 63 - protein, 354 aa, Artificial Sequence
  Synthesized
MNTKYNKEFLLYLAGFVDSDGSIYATIAPKQQLKFKHQLQLVFVVAQKTRRRWFLDKLVDEIGVGYVHDYGRASYYRLSQIKPLHNFLTQLQPFLKLKQKQANLVLKIIEQLPSAKESPDKFLEVCTWVDQIAALNDSKTRKTTSETVRAVLDSLPGSVGGLSPSQASSAASSASSSPGSGISEALRAGAGSGTGYNKEFLLYLAGFVDGDGSICASIRPCQVAKFKHALELRFTVGQATCRRWFLDKLVDEIGVGYVYDLGTCCQYNLSQIKPLHNFLTQLQPFLKLKQKQANLVLKIIEQLPSAKESPDKFLEVCTWVDQIAALNDSHTRKTTSETVRAVLDSLSEKKKSSP

SEQ ID NO: 64 - protein, 354 aa, Artificial Sequence
  Synthesized
MNTKYNKEFLLYLAGFVDADGSIYATIAPKQQLKFKHQLQLVFVVAQKTRRRWFLDKLVDEIGVGYVHDYGRASYYRLSQIKPLHNFLTQLQPFLKLKQKQANLVLKIIEQLPSAKESPDKFLEVCTWVDQIAALNDSRTRKTTSETVRAVLDSLPGSVGGLSPSQASSAASSASSSPGSGISEALRAGAGSGTGYNKEFLLYLAGFVDGDGSICASIRPCQVAKFKHALELRFTVGQSTCRRWFLDKLVDEIGVGYVYDLGHACQYNLSQIKPLHNFLTQLQPFLKLKQKQANLVLKIIEQLPSAKESPDKFLEVCTWVDQIAALNDSKTRKTTSETVRAVLDSLSEKKKSSP

SEQ ID NO: 65 - protein, 354 aa, Artificial Sequence
  Synthesized
MNTKYNKEFLLYLAGFVDGDGSIYATIAPKQQLKFKHQLQLVFVVAQKTRRRWFLDKLVDEIGVGYVHDYGRASYYRLSQIKPLHNFLTQLQPFLKLKQKQANLVLKIIEQLPSAKESPDKFLEVCTWVDQIAALNDSKTRKTTSETVRAVLDSLPGSVGGLSPSQASSAASSASSSPGSGISEALRAGAGSGTGYNKEFLLYLAGFVDADGSICASIRPCQVAKFKHALELRFTVGQLTQRRWFLDKLVDEIGVGYVYDLGNSCQYNLSQIKPLHNFLTQLQPFLKLKQKQANLVLKIIEQLPSAKESPDKFLEVCTWVDQIAALNDSKTRKTTSETVRAVLDSLSEKKKSSP

SEQ ID NO: 66 - protein, 354 aa, Artificial Sequence
  Synthesized
MNTKYNKEFLLYLAGFVDADGSIYATIAPKQQLKFKHQLQLVFVVAQNTRRRWFLDKLVDEIGVGYVHDYGRASYYRLSQIKPLHNFLTQLQPFLKLKQKQANLVLKIIEQLPSAKESPDKFLEVCTWVDQIAALNDSKTRKTTSETVRAVLDSLPGSVGGLSPSQASSAASSASSSPGSGISEALRAGAGSGTGYNKEFLLYLAGFVDGDGSICASIRPCQVAKFKHALELRFTVGQSTKRRWFLDKLVDEIGVGYVYDLERACQYNLSQIKPLHNFLTQLQPFLKLKQKQANLVLKIIEQLPSAKESPDKFLEVCTWVDQIAALNDSKTRKTTSETVRAVLDSLSEKKKSSP

SEQ ID NO: 67 - protein, 354 aa, Artificial Sequence
  Synthesized
MNTKYNKEFLLYLAGFVDADGSIYATIAPKQQLKFKHQLQLVFVVAQKTRRRWILDKLVDEIGVGYVHDYGRGSYYRLSQIKPLHNFLTQLQPFLKLKQKQANLVLKIIEQLPSAKESPDKFLEVCTWVDQIAALNDSKTRKTTSETVRAVLDSLPGSVGGLSPSQASSAASSASSSPGSGISEALRAGAGSGTGYNKEFLLYLAGFVDGDGSICASIRPCQVAKFKHALELRFTVGQKTCRRWFLDKLVDEIGVGYVYDLGGRSQYNLSQIKPLHNFLTQLQPFLKLKQKQANLVLKIIEQLPSAKESPDKFLEVCTWVDQIAALNDSRTRKTTSETVRAVLDSLSEKKKSSP

SEQ ID NO: 68 - DNA, 22 bp, Artificial Sequence
  Synthesized
gtatagcatacgatatacgaag

SEQ ID NO: 69 - DNA, 22 bp, Artificial Sequence
  Synthesized
catatcgtatgctatatgcttc

SEQ ID NO: 70 - protein, 354 aa, Artificial Sequence
  Synthesized
MNTKYNKEFLLYLAGFVDGDGSIYATIAPKQQLKFKHQLQLVFVVAQKTRRRWFLDKLVDEIGVGYVHDYGRASYYRLSQIKPLHNFLTQLQPFLKLKQKQANLVLKIIEQLPSAKESPDKFLEVCTWVDQIAALNDSKTRKTTSETVRAVLDSLPGSVGGLSPSQASSAASSASSSPGSGISEALRAGAGSGTGYNKEFLLYLAGFVDADGSICASIRPCQVAKFKHALELRFTVGQATRRRWFLDKLVDEIGVGYVYDLGRISQYNLSEIKPLHNFLTQLQPFLKLKQKQANLVLKIIEQLPSAKESPDKFLEVCTWVDQIAALNDSKTRKTTSETVRAVLDSLSEKKKSSP

SEQ ID NO: 71 - protein, 354 aa, Artificial Sequence
  Synthesized
MNTKYNKEFLLYLAGFVDGDGSIYATIAPKQQLKFKHQLQLVFVVAQKTRRRWFLDKLVDEIGVGYVHDYGRASYYRLSQIKPLHNFLTQLQPFLKLKQKQANLVLKIIEQLPSAKESPDKFLEVCTWVDQIAALNDSKTRKTTSETVRAVLDSLPGSVGGLSPSQASSAASSASSSPGSGISEALRAGAGSGTGYNKEFLLYLAGFVDADGSICASIRPCQVAKFKHALELRFTVGQATIRRWFLDKLVDEIGVGYVYDLGRVAQYNLSQIKPLHNFLTQLQPFLKLKQKQANLVLKIIEQLPSAKESPDKFLEVCTWVDQIAALNDSRTRKTTSETVRAVLDSLSEKKKSSP

SEQ ID NO: 72 - protein, 354 aa, Artificial Sequence
  Synthesized
MNTKYNKEFLLYLAGFVDGDGSIYATIAPKQQLKFKHQLQLVFVVAQKTRRRWFLDKLVDEIGVGYVHDYGRASYYRLSEIKPLHNFLTQLQPFLKLKQKQANLVLKIIEQLPSAKESPDKFLEVCTWVDQIAALNDSKTRKTTSETVRAVLDSLPGSVGGLSPSQASSAASSASSSPGSGISEALRAGAGSGTGYNKEFLLYLAGFVDADGSICASIRPCQVAKFKHALELRFTVGQATRRRWFLDKLVDEIGVGYVYDLGHIAQYNLSQIKPLHNFLTQLQPFLKLKQKQANLVLKIIEQLPSAKESPDKFLEVCTWVDQIAALNDSKTRKTTSETVRAVLDSLSEKKKSSP

SEQ ID NO: 73 - protein, 354 aa, Artificial Sequence
  Synthesized
MNTKYNKEFLLYLAGFVDADGSIYATIAPKQQLKFKHQLQLVFVVAQKTWRRWFLDKLVDEIGVGYVHDYPPASYYRLSEIKPLHNFLTQLQPFLKLKQKQANLVLKIIEQLPSAKESPDKFLEVCTWVDQIAALNDSKTRKTTSETVRAVLDSLPGSVGGLSPSQASSAASSASSSPGSGISEALRAGAGSGTGYNKEFLLYLAGFVDGDGSICASIRPCQVAKFKHALELRFTVGQKTSRRWFLDKLVDEIGVGYVYDLGRIAQYNLSQIKPLHNFLTQLQPFLKLKQKQANLVLKIIEQLPSAKESPDKFLEVCTWVDQIAALNDSRTRKTTSETVRAVLDSLSEKKKSSP

SEQ ID NO: 74 - protein, 354 aa, Artificial Sequence
  Synthesized
MNTKYNKEFLLYLAGFVDSDGSIYATIAPKQQLKFKHQLQLVFVVAQKTRRRWFLDKLVDEIGVGYVHDYGRASYYRLSQIKPLHNFLTQLQPFLKLKQKQANLVLKIIEQLPSAKESPDKFLEVCTWVDQIAALNDSKTRKTTSETVRAVLDSLPGSVGGLSPSQASSAASSASSSPGSGISEALRAGAGSGTGYNKEFLLYLAGFVDGDGSICASIRPCQVAKFKHALELRFTVGQKTCRRWFLDKLVDEIGVGYVYDLGHIAQYNLSQIKPLHNFLTQLQPFLKLKQKQANLVLKIIEQLPSAKESPDKFLEVCTWVDQIAALNDSKTRKTTSETVRAVLDSLSEKKKSSP

SEQ ID NO: 75 - protein, 354 aa, Artificial Sequence
  Synthesized
MNTKYNKEFLLYLAGFVDADGSIYATIAPKQQLKFKHQLQLVFVVAQKTRRRWFLDKLVDEIGVGYVHDYGRASYYRLSQIKPLHNFLTQLQPFLKLKQKQANLVLKIIEQLPSAKESPDKFLEVCTWVDQIAALNDSKTRKTTSETVRAVLDSLPGSVGGLSPSQASSAASSASSSPGSGISEALRAGAGSGTGYNKEFLLYLAGFVDGDGSICASIRPCQVAKFKHALELRFTVGQHTRRRWFLDKLVDEIGVGYVYDLGRVSQYNLSEIKPLHNFLTQLQPFLKLKQKQANLVLKIIEQLPSAKESPDKFLEVCTWVDQIAALNDSRTRKTTSETVRAVLDSLSEKKKSSP

SEQ ID NO: 76 - protein, 354 aa, Artificial Sequence
  Synthesized
MNTKYNKEFLLYLAGFVDGDGSIYATIAPKQQLKFKHQLQLVFVVAQKTRRRWFLDKLVDEIGVGYVHDYGRASYYRLSQIKPLHNFLTQLQPFLKLKQKQANLVLKIIEQLPSAKESPDKFLEVCTWVDQIAALNDSKTRKTTSETVRAVLDSLPGSVGGLSPSQASSAASSASSSPGSGISEALRAGAGSGTGYNKEFLLYLAGFVDADGSICASIRPCQVAKFKHALELRFTVGQKTVRRWFLDKLVDEIGVGYVYDLGRISQYNLSEIKPLHNFLTQLQPFLKLKQKQANLVLKIIEQLPSAKESPDKFLEVCTWVDQIAALNDSKTRKTTSETVRAVLDSLSEKKKSSP

SEQ ID NO: 77 - protein, 354 aa, Artificial Sequence
  Synthesized
MNTKYNKEFLLYLAGFVDGDGSIYATIAPKQQLKFKHQLQLVFVVAQKTARRWFLDKLVDEIGVGYVHDYGRASYYRLSQIKPLHNFLTQLQPFLKLKQKQANLVLKIIEQLPSAKESPDKFLEVCTWVDQIAALNDSKTRKTTSETVRAVLDSLPGSVGGLSPSQASSAASSASSSPGSGISEALRAGAGSGTGYNKEFLLYLAGFVDADGSICASIRPCQVAKFKHALELRFTVGQATRRRWFLDKLVDEIGVGYVYDLGRVSQYNLSQIKPLHNFLTQLQPFLKLKQKQANLVLKIIEQLPSAKESPDKFLEVCTWVDQIAALNDSRTRKTTSETVRAVLDSLSEKKKSSP

SEQ ID NO: 78 - protein, 354 aa, Artificial Sequence
  Synthesized
MNTKYNKEFLLYLAGFVDADGSIYATIAPKQQLKFKHQLQLVFVVAQKTRRRWFLDKLVDEIGVGYVHDYGRASYYRLSQIKPLHNFLTQLQPFLKLKQKQANLVLKIIEQLPSAKESPDKFLEVCTWVDQIAALNDSKTRKTTSETVRAVLDSLPGSVGGLSPSQASSAASSASSSPGSGISEALRAGAGSGTGYNKEFLLYLAGFVDGDGSICASIRPCQVAKFKHALELRFTVGQKTGRRWFLDKLVDEIGVGYVYDLGRISQYNLSQIKPLHNFLTQLQPFLKLKQKQANLVLKIIEQLPSAKESPDKFLEVCTWVDQIAALNDSRTRKTTSETVRAVLDSLSEKKKSSP

SEQ ID NO: 79 - protein, 354 aa, Artificial Sequence; identical to SEQ ID NO: 70
  Synthesized

SEQ ID NO: 80 - protein, 354 aa, Artificial Sequence
  Synthesized
MNTKYNKEFLLYLAGFVDGDGSIYATIAPKQQLKFKHQLQLVFVVAQKTRRRWFLDKLVDEIGVGYVHDYGRASYYRLSQIKPLHNFLTQLQPFLKLKQKQANLVLKIIEQLPSAKESPDKFLEVCTWVDQIAALNDSKTRKTTSETVRAVLDSLPGSVGGLSPSQASSAASSASSSPGSGISEALRAGAGSGTGYNKEFLLYLAGFVDADGSICASIRPCQVAKFKHALELRFTVGQHTCRRWFLDKLVDEIGVGYVYDLGRISQYNLSQIKPLHNFLTQLQPFLKLKQKQANLVLKIIEQLPSAKESPDKFLEVCTWVDQIAALNDSRTRKTTSETVRAVLDSLSEKKKSSP

SEQ ID NO: 81 - protein, 354 aa, Artificial Sequence
  Synthesized
MNTKYNKEFLLYLAGFVDGDGSIYATIAPKQQLKFKHQLQLVFVVAQKTVRRWFLDKLVDEIGVGYVHDYGRASYYRLSQIKPLHNFLTQLQPFLKLKQKQANLVLKIIEQLPSAKESPDKFLEVCTWVDQIAALNDSKTRKTTSETVRAVLDSLPGSVGGLSPSQASSAASSASSSPGSGISEALRAGAGSGTGYNKEFLLYLAGFVDADGSICASIRPCQVAKFKHALELRFTVGQHTRRRWFLDKLVDEIGVGYVYDLGRIAQYNLSEIKPLHNFLTQLQPFLKLKQKQANLVLKIIEQLPSAKESPDKFLEVCTWVDQIAALNDSRTRKTTSETVRAVLDSLSEKKKSSP

SEQ ID NO: 82 - protein, 354 aa, Artificial Sequence
  Synthesized
MNTKYNKEFLLYLAGFVDGDGSIYATIAPKQQLKFKHQLQLVFVVAQKTVRRWFLDKLVDEIGVGYVHDYGRASYYRLSQIKPLHNFLTQLQPFLKLKQKQANLVLKIIEQLPSAKESPDKFLEVCTWVDQIAALNDSKTRKTTSETVRAVLDSLPGSVGGLSPSQASSAASSASSSPGSGISEALRAGAGSGTGYNKEFLLYLAGFVDADGSICASIRPCQVAKFKHALELRFTVGQHTSRRWFLDKLVDEIGVGYVYDLGRISQYNLSQIKPLHNFLTQLQPFLKLKQKQANLVLKIIEQLPSAKESPDKFLEVCTWVDQIAALNDSKTRKTTSETVRAVLDSLSEKKKSSP

SEQ ID NO: 83 - protein, 354 aa, Artificial Sequence
  Synthesized
MNTKYNKEFLLYLAGFVDGDGSIYATIAPKQQLKFKHQLQLVFVVAQKTRRRWFLDKLVDEIGVGYVHDYGRASYYRLSQIKPLHNFLTQLQPFLKLKQKQANLVLKIIEQLPSAKESPDKFLEVCTWVDQIAALNDSKTRKTTSETVRAVLDSLPGSVGGLSPSQASSAASSASSSPGSGISEALRAGAGSGTGYNKEFLLYLAGFVDADGSICASIRPCQVAKFKHALELRFTVGQTTRRRWFLDKLVDEIGVGYVYDLGRIAQYNLSEIKPLHNFLTQLQPFLKLKQKQANLVLKIIEQLPSAKESPDKFLEVCTWVDQIAALNDSRTRKTTSETVRAVLDSLSEKKKSSP

SEQ ID NO: 84 - protein, 354 aa, Artificial Sequence
  Synthesized
MNTKYNKEFLLYLAGFVDADGSIYATIAPKQQLKFKHQLQLVFVVAQKTRRRWFLDKLVDEIGVGYVHDYGRASYYRLSQIKPLHNFLTQLQPFLKLKQKQANLVLKIIEQLPSAKESPDKFLEVCTWVDQIAALNDSKTRKTTSETVRAVLDSLPGSVGGLSPSQASSAASSASSSPGSGISEALRAGAGSGTGYNKEFLLYLAGFVDGDGSICASIRPCQVAKFKHALELRFTVGQATRRRWFLDKLVDEIGVGYVYDLGRIAQYNLSEIKPLHNFLTQLQPFLKLKQKQANLVLKIIEQLPSAKESPDKFLEVCTWVDQIAALNDSRTRKTTSETVRAVLDSLSEKKKSSP

SEQ ID NO: 85 - protein, 354 aa, Artificial Sequence
  Synthesized
MNTKYNKEFLLYLAGFVDGDGSIYATIAPKQQLKFKHQLQLVFVVAQKTRRRWFLDKLVDEIGVGYVHDYGRASYYRLSQIKPLHNFLTQLQPFLKLKQKQANLVLKIIEQLPSAKESPDKFLEVCTWVDQIAALNDSKTRKTTSETVRAVLDSLPGSVGGLSPSQASSAASSASSSPGSGISEALRAGAGSGTGYNKEFLLYLAGFVDADGSICASIRPCQVAKFKHALELRFTVGQKTCRRWFLDKLVDEIGVGYVYDLGRISQYNLSEIKPLHNFLTQLQPFLKLKQKQANLVLKIIEQLPSAKESPDKFLEVCTWVDQIAALNDSKTRKTTSETVRAVLDSLSEKKKSSP

SEQ ID NO: 86 - protein, 354 aa, Artificial Sequence
  Synthesized
MNTKYNKEFLLYLAGFVDADGSIYATIAPKQQLKFKHQLQLVFVVAQKTRRRWFLDKLVDEIGVGYVHDYGRASYYRLSQIKPLHNFLTQLQPFLKLKQKQANLVLKIIEQLPSAKESPDKFLEVCTWVDQIAALNDSKTRKTTSETVRAVLDSLPGSVGGLSPSQASSAASSASSSPGSGISEALRAGAGSGTGYNKEFLLYLAGFVDGDGSICASIRPCQVAKFKHALELRFTVGQGTRRRWFLDKLVDEIGVGYVYDLGRIAQYNLSQIKPLHNFLTQLQPFLKLKQKQANLVLKIIEQLPSAKESPDKFLEVCTWVDQIAALNDSRTRKTTSETVRAVLDSLSEKKKSSP

SEQ ID NO: 87 - protein, 354 aa, Artificial Sequence
  Synthesized
MNTKYNKEFLLYLAGFVDADGSIYATIAPKQQLKFKHQLQLVFVVAQKTRRRWFLDKLVDEIGVGYVHDYGRASYYRLSQIKPLHNFLTQLQPFLKLKQKQANLVLKIIEQLPSAKESPDKFLEVCTWVDQIAALNDSKTRKTTSETVRAVLDSLPGSVGGLSPSQASSAASSASSSPGSGISEALRAGAGSGTGYNKEFLLYLAGFVDGDGSICASIRPCQVAKFKHALELRFTVGQQTRRRWFLDKLVDEIGVGYVYDLGRISQYNLSQIKPLHNFLTQLQPFLKLKQKQANLVLKIIEQLPSAKESPDKFLEVCTWVDQIAALNDSRTRKTTSETVRAVLDSLSEKKKSSP

SEQ ID NO: 88 - protein, 354 aa, Artificial Sequence
  Synthesized
MNTKYNKEFLLYLAGFVDGDGSIYATIAPKQQLKFKHQLQLVFVVAQKTRRRWFLDKLVDEIGVGYVHDYGRASYYRLSQIKPLHNFLTQLQPFLKLKQKQANLVLKIIEQLPSAKESPDKFLEVCTWVDQIAALNDSKTRKTTSETVRAVLDSLPGSVGGLSPSQASSAASSASSSPGSGISEALRAGAGSGTGYNKEFLLYLAGFVDADGSICASIRPCQVAKFKHALELRFTVGQATIRRWFLDKLVDEIGVGYVYDLGRVSQYNLSQIKPLHNFLTQLQPFLKLKQKQANLVLKIIEQLPSAKESPDKFLEVCTWVDQIAALNDSRTRKTTSETVRAVLDSLSEKKKSSP

SEQ ID NO: 89 - protein, 354 aa, Artificial Sequence
  Synthesized
MNTKYNKEFLLYLAGFVDADGSIYATIAPKQQLKFKHQLQLVFVVAQKTTRRWFLDKLVDEIGVGYVHDYGRASYYRLSQIKPLHNFLTQLQPFLKLKQKQANLVLKIIEQLPSAKESPDKFLEVCTWVDQIAALNDSKTRKTTSETVRAVLDSLPGSVGGLSPSQASSAASSASSSPGSGISEALRAGAGSGTGYNKEFLLYLAGFVDGDGSICASIRPCQVAKFKHALELRFTVGQKTSRRWFLDKLVDEIGVGYVYDLGRVSQYNLSEIKPLHNFLTQLQPFLKLKQKQANLVLKIIEQLPSAKESPDKFLEVCTWVDQIAALNDSRTRKTTSETVRAVLDSLSEKKKSSP

SEQ ID NO: 90 - DNA, 22 bp, Artificial Sequence
  Synthesized
gtatagcatacgctatacgaag

SEQ ID NO: 91 - DNA, 22 bp, Artificial Sequence
  Synthesized
catatcgtatgcgatatgcttc

SEQ ID NO: 92 - protein, 354 aa, Artificial Sequence
  Synthesized
MNTKYNKEFLLYLAGFVDGDGSIYATIAPKQQLKFKHQLQLVFVVAQHTQRRWFLDKLVDEIGVGYVHDYGRASYYRLSQIKPLHNFLTQLQPFLKLKQKQANLVLKIIEQLPSAKESPDKFLEVCTWVDQIAALNDSKTRKTTSETVRAVLDSLPGSVGGLSPSQASSAASSASSSPGSGISEALRAGAGSGTGYNKEFLLYLAGFVDADGSICASIRPCQVAKFKHALELRFTVGQKTERRWFLDKLVDEIGVGYVYDLGRTAQYNLSQIKPLHNFLTQLQPFLKLKQKQANLVLKIIEQLPSAKESPDKFLEVCTWVDQIAALNDSKTRKTTSETVRAVLDSLSEKKKSSP

SEQ ID NO: 93 - protein, 354 aa, Artificial Sequence
  Synthesized
MNTKYNKEFLLYLAGFVDADGSIYATIAPKQQLKFKHQLQLVFVVAQQTRRRWFLDKLVDEIGVGYVHDYGRASYYRLSQIKPLHNFLTQLQPFLKLKQKQANLVLKIIEQLPSAKESPDKFLEVCTWVDQIAALNDSKTRKTTSETVRAVLDSLPGSVGGLSPSQASSAASSASSSPGSGISEALRAGAGSGTGYNKEFLLYLAGFVDGDGSICASIRPCQVAKFKHALELRFTVGQHTKRRWFLDKLVDEIGVGYVYDLGRVAQYNLSEIKPLHNFLTQLQPFLKLKQKQANLVLKIIEQLPSAKESPDKFLEVCTWVDQIAALNDSRTRKTTSETVRAVLDSLSEKKKSSP

SEQ ID NO: 94 - protein, 354 aa, Artificial Sequence
  Synthesized
MNTKYNKEFLLYLAGFVDADGSIYATIAPKQQLKFKHQLQLVFVVAQKTRRRWFLDKLVDEIGVGYVHDYGRASYYRLSQIKPLHNFLTQLQPFLKLKQKQANLVLKIIEQLPSAKESPDKFLEVCTWVDQIAALNDSKTRKTTSETVRAVLDSLPGSVGGLSPSQASSAASSASSSPGSGISEALRAGAGSGTGYNKEFLLYLAGFVDGDGSICASIRPCQVAKFKHALELRFTVGQKTSRRWFLDKLVDEIGVGYVYDLKRIAQYNLSQIKPLHNFLTQLQPFLKLKQKQANLVLKIIEQLPSAKESPDKFLEVCTWVDQIAALNDSNTRKTTSETVRAVLDSLSEKKKSSP

SEQ ID NO: 95 - protein, 354 aa, Artificial Sequence
  Synthesized
MNTKYNKEFLLYLAGFVDGDGSIYATIAPKQQLKFKHQLQLVFVVAQKTRRRWFLDKLVDEIGVGYVHDYGRASYYRLSQIKPLHNFLTQLQPFLKLKQKQANLVLKIIEQLPSAKESPDKFLEVCTWVDQIAALNDSKTRKTTSETVRAVLDSLPGSVGGLSPSQASSAASSASSSPGSGISEALRAGAGSGTGYNKEFLLYLAGFVDADGSICASIRPCQVAKFKHALELRFTVGQLTKRRWFLDKLVDEIGVGYVYDLGRVTQYNLSEIKPLHNFLTQLQPFLKLKQKQANLVLKIIEQLPSAKESPDKFLEVCTWVDQIAALNDSHTRKTTSETVRAVLDSLSEKKKSSP

SEQ ID NO: 96 - protein, 354 aa, Artificial Sequence
  Synthesized
MNTKYNKEFLLYLAGFVDADGSIYATIAPKQQLKFKHQLQLVFVVAQKTRRRWFLDKLVDEIGVGYVHDYRRASYYRLSQIKPLHNFLTQLQPFLKLKQKQANLVLKIIEQLPSAKESPDKFLEVCTWVDQIAALNDSKTRKTTSETVRAVLDSLPGSVGGLSPSQASSAASSASSSPGSGISEALRAGAGSGTGYNKEFLLYLAGFVDGDGSICASIRPCQVAKFKHALELRFTVGQKTERRWFLDKLVDEIGVGYVYDLGRVAQYNLSEIKPLHNFLTQLQPFLKLKQKQANLVLKIIEQLPSAKESPDKFLEVCTWVDQIAALNDSRTRKTTSETVRAVLDSLSEKKKSSP

SEQ ID NO: 97 - protein, 354 aa, Artificial Sequence
  Synthesized
MNTKYNKEFLLYLAGFVDADGSIYATIAPKQQLKFKHQLQLVFVVAQLTRRRWFLDKLVDEIGVGYVHDYGRASYYRLSQIKPLHNFLTQLQPFLKLKQKQANLVLKIIEQLPSAKESPDKFLEVCTWVDQIAALNDSKTRKTTSETVRAVLDSLPGSVGGLSPSQASSAASSASSSPGSGISEALRAGAGSGTGYNKEFLLYLAGFVDGDGSICASIRPCQVAKFKHALELRFTVGQHTKRRWFLDKLVDEIGGGYVYDLGRIAQYNLSEIKPLHNFLTQLQPFLKLKQKQANLVLKIIEQLPSAKESPDKFLEVCTWVDQIAALNDSHTRKTTSETVRAVLDSLSEKKKSSP

SEQ ID NO: 98 - protein, 354 aa, Artificial Sequence
  Synthesized
MNTKYNKEFLLYLAGFVDGDGSIYATIAPKQQLKFKHQLQLVFVVAQKTRRRWFLDKLVDEIGVGYVHDYGRASYYRLSQIKPLHNFLTQLQPFLKLKQKQANLVLKIIEQLPSAKESPDKFLEVCTWVDQIAALNDSKTRKTTSETVRAVLDSLPGSVGGLSPSQASSAASSASSSPGSGISEALRAGAGSGTGYNKEFLLYLAGFVDADGSICASIRPCQVAKFKHALELRFTVGQKTERRWFLDKLVDEIGVGYVYDLSRVAQYNLSQIKPLHNFLTQLQPFLKLKQKQANLVLKIIEQLPSAKESPDKFLEVCTWVDQIAALNDSRTRKTTSETVRAVLDSLSEKKKSSP

SEQ ID NO: 99 - protein, 354 aa, Artificial Sequence
  Synthesized
MNTKYNKEFLLYLAGFVDADGSIYATIAPKQQLKFKHQLQLVFVVAQHTKRRWFLDKLVDEIGVGYVHDYAPASYYRLSQIKPLHNFLTQLQPFLKLKQKQANLVLKIIEQLPSAKESPDKFLEVCTWVDQIAALNDSKTRKTTSETVRAVLDSLPGSVGGLSPSQASSAASSASSSPGSGISEALRAGAGSGTGYNKEFLLYLAGFVDGDGSICASIRPCQVAKFKHALELRFTVGQHTKRRWFLDKLVDEIGVGYVYDLGAISQYNLSEIKPLHNFLTQLQPFLKLKQKQANLVLKIIEQLPSAKESPDKFLEVCTWVDQIAALNDSHTRKTTSETVRAVLDSLSEKKKSSP

SEQ ID NO: 100 - protein, 354 aa, Artificial Sequence
  Synthesized
MNTKYNKEFLLYLAGFVDADGSIYATIAPKQQLKFKHQLQLVFVVAQKTSRRWFLDKLVDEIGVGYVHDYRRASYYRLSQIKPLHNFLTQLQPFLKLKQKQANLVLKIIEQLPSAKESPDKFLEVCTWVDQIAALNDSKTRKTTSETVRAVLDSLPGSVGGLSPSQASSAASSASSSPGSGISEALRAGAGSGTGYNKEFLLYLAGFVDGDGSICASIRPCQVAKFKHALELRFTVGQKTIRRWFLDKLVDEIGVGYVYDLGRIAQYNLSQIKPLHNFLTQLQPFLKLKQKQANLVLKIIEQLPSAKESPDKFLEVCTWVDQIAALNDSRTRKTTSETVRAVLDSLSEKKKSSP

SEQ ID NO: 101 - protein, 354 aa, Artificial Sequence
  Synthesized
MNTKYNKEFLLYLAGFVDGDGSIYATIAPKQQLKFKHQLQLVFVVAQLTKRRWFLDKLVDEIGVGYVHDYGRASYYRLSQIKPLHNFLTQLQPFLKLKQKQANLVLKIIEQLPSAKESPDKFLEVCTWVDQIAALNDSKTRKTTSETVRAVLDSLPGSVGGLSPSQASSAASSASSSPGSGISEALRAGAGSGTGYNKEFLLYLAGFVDADGSICASIRPCQVAKFKHALELRFTVGQLTNRRWFLDKLVDEIGVGYVYDLGRISQYNLSQIKPLHNFLTQLQPFLKLKQKQANLVLKIIEQLPSAKESPDKFLEVCTWVDQIAALNDSHTRKTTSETVRAVLDSLSEKKKSSP

SEQ ID NO: 102 - protein, 354 aa, Artificial Sequence
  Synthesized
MNTKYNKEFLLYLAGFVDGDGSIYATIAPKQQLKFKHQLQLVFVVAQLTKRRWFLDKLVDEIGVGYVHDYGRASYYRLSQIKPLHNFLTQLQPFLKLKQKQANLVLKIIEQLPSAKESPDKFLEVCTWVDQIAALNDSKTRKTTSETVRAVLDSLPGSVGGLSPSQASSAASSASSSPGSGISEALRAGAGSGTGYNKEFLLYLAGFVDADGSICASIRPCQVAKFKHALELRFTVGQATKRRWFLDKLADEIGVGYVYDLARISQYNLSQIKPLHNLLTQLQPFLKLKQKQANLVLKIIEQLPSAKESPDKFLEVCTWVDQIAALNDSHTRKTTSETVRAVLDSLSEKKKSSP

SEQ ID NO: 103 - protein, 354 aa, Artificial Sequence
  Synthesized
MNTKYNKEFLLYLAGFVDADGSIYATIAPKQQLKFKHQLQLVFVVAQLTRRRWFLDKLVDEIGVGYVHDYRHASYYRLSQIKPLHNFLTQLQPFLKLKQKQANLVLKIIEQLPSAKESPDKFLEVCTWVDQIAALNDSKTRKTTSETVRAVLDSLPGSVGGLSPSQASSAASSASSSPGSGISEALRAGAGSGTGYNKEFLLYLAGFVDGDGSICASIRPCQVAKFKHALELRFTVGQSTKRRWFLDKLVDEIGVGYVYDLGTVSQYNLSQIKPLHNFLTQLQPFLKLKQKQANLVLKIIEQLPSAKESPDKFLEVCTWVDQIAALNDSRTRKTTSETVRAVLDSLSEKKKSSP

SEQ ID NO: 104 - protein, 354 aa, Artificial Sequence
  Synthesized
MNTKYNKEFLLYLAGFVDADGSIYATIAPKQQLKFKHQLQLVFVVAQHTRRRWFLDKLVDEIGVGYVHDYRRASYYRLSQIKPLHNFLTQLQPFLKLKQKQANLVLKIIEQLPSAKESPDKFLEVCTWVDQIAALNDSKTRKTTSETVRAVLDSLPGSVGGLSPSQASSAASSASSSPGSGISEALRAGAGSGTGYNKEFLLYLAGFVDGDGSICASIRPCQVAKFKHALELRFTVGQATKRRWFLDKLVDEIGVGYVYDLGRTAQYNLSEIKPLHNFLTQLQPFLKLKQKQANLVLKIIEQLPSAKESPDKFLEVCTWVDQIAALNDSKTRKTTSETVRAVLDSLSEKKKSSP

SEQ ID NO: 105 - protein, 354 aa, Artificial Sequence
  Synthesized
MNTKYNKEFLLYLAGFVDADGSIYATIAPKQQLKFKHQLQLVFVVAQKTTRRWFLDKLVDEIGVGYVHDYGRASYYRLSQIKPLHNFLTQLQPFLKLKQKQANLVLKIIEQLPSAKESPDKFLEVCTWVDQIAALNDSKTRKTTSETVRAVLDSLPGSVGGLSPSQASSAASSASSSPGSGISEALRAGAGSGTGYNKEFLLYLAGFVDGDGSICASIRPCQVAKFKHALELRFTVGQKTIRRWFLDKLVDEIGVGYVYDLGSVSQYNLSEIKPLHNFLTQLQPFLKLKQKQANLVLKIIEQLPSAKESPDKFLEVCTWVDQIAALNDSRTRKTTSETVRAVLDSLSEKKKSSP

SEQ ID NO: 106 - protein, 354 aa, Artificial Sequence
  Synthesized
MNTKYNKEFLLYLAGFVDADGSIYATIAPKQQLKFKHQLQLVFVVAQLTRRRWFLDKLVDEIGVGYVHDYGRASYYRLSQIKPLHNFLTQLQPFLKLKQKQANLVLKIIEQLPSAKESPDKFLEVCTWVDQIAALNDSKTRKTTSETVRAVLDSLPGSVGGLSPSQASSAASSASSSPGSGISEALRAGAGSGTGYNKEFLLYLAGFVDGDGSICASIRPCQVAKFKHALELRFTVGQKTNRRWFLDKLVDEIGVGYVYDLGRVAQYNLSEIKPLHNFLTQLQPFLKLKQKQANLVLKIIEQLPSAKESPDKFLEVCTWVDQIAALNDSHTRKTTSETVRAVLDSLSEKKKSSP

SEQ ID NO: 107 - protein, 354 aa, Artificial Sequence
  Synthesized
MNTKYNKEFLLYLAGFVDGDGSIYATIAPKQQLKFKHQLQLVFVVAQKTRRRWFLDKLVDEIGVGYVHDYGRASYYRLSQIKPLHNFLTQLQPFLKLKQKQANLVLKIIEQLPSAKESPDKFLEVCTWVDQIAALNDSKTRKTTSETVRAVLDSLPGSVGGLSPSQASSAASSASSSPGSGISEALRAGAGSGTGYNKEFLLYLAGFVDADGSICASIRPCQVAKFKHALELRFTVGQKTVRRWFLDKLVDEIGVGYVYDLGHTAQYNLSQIKPLHNFLTQLQPFLKLKQKQANLVLKIIEQLPSAKESPDKFLEVCTWVDQIAALNDSHTRKTTSETVRAVLDSLSEKKKSSP

SEQ ID NO: 108 - protein, 354 aa, Artificial Sequence
  Synthesized
MNTKYNKEFLLYLAGFVDADGSIYATIAPKQQLKFKHQLQLVFVVAQKTRRRWFLDKLVDEIGVGYVHDYGRASYYRLSQIKPLHNFLTQLQPFLKLKQKQANLVLKIIEQLPSAKESPDKFLEVCTWVDQIAALNDSKTRKTTSETVRAVLDSLPGSVGGLSPSQASSAASSASSSPGSGISEALRAGAGSGTGYNKEFLLYLAGFVDGDGSICASIRPCQVAKFKHALELRFTVGQHTKRRWFLDKLVDEIGVGYVYDLRRVAQYNLSEIKPLHNFLTQLQPFLKLKQKQANLVLKIIEQLPSAKESPDKFLEVCTWVDQIAALNDSRTRKTTSETVRAVLDSLSEKKKSSP

SEQ ID NO: 109 - protein, 354 aa, Artificial Sequence
  Synthesized
MNTKYNKEFLLYLAGFVDADGSIYATIAPKQQLKFKHQLQLVFVVAQKTCRRWFLDKLVDEIGVGYVHDYGRASYYRLSQIKPLHNFLTQLQPFLKLKQKQANLVLKIIEQLPSAKESPDKFLEVCTWVDQIAALNDSKTRKTTSETVRAVLDSLPGSVGGLSPSQASSAASSASSSPGSGISEALRAGAGSGTGYNKEFLLYLAGFVDGDGSICASIRPCQVAKFKHALELRFTVGQLTNRRWFLDKLVDEIGVGYVYDLGRVAQYNLSQIKPLHNFLTQLQPFLKLKQKQANLVLKIIEQLPSAKESPDKFLEVCTWVDQIAALNDSRTRKTTSETVRAVLDSLSEKKKSSP

SEQ ID NO: 110 - protein, 354 aa, Artificial Sequence
  Synthesized
MNTKYNKEFLLYLAGFVDGDGSIYATIAPKQQLKFKHQLQLVFVVAQATRRRWFLDKLVDEIGVGYVHDYGRASYYRLSQIKPLHNFLTQLQPFLKLKQKQANLVLKIIEQLPSAKESPDKFLEVCTWVDQIAALNDSKTRKTTSETVRAVLDSLPGSVGGLSPSQASSAASSASSSPGSGISEALRAGAGSGTGYNKEFLLYLAGFVDADGSICASIRPCQVAKFKHALELRFTVGQKTIRRWFLDKLVDEIGVGYVYDLGRCAQYNLSEIKPLHNFLTQLQPFLKLKQKQANLVLKIIEQLPSAKESPDKFLEVCTWVDQIAALNDSHTRKTTSETVRAVLDSLSEKKKSSP

SEQ ID NO: 111 - protein, 354 aa, Artificial Sequence
  Synthesized
MNTKYNKEFLLYLAGFVDADGSIYATIAPKQQLKFKHQLQLVFVVAQSTRRRWFLDKLVDEIGVGYVHDYGRASYYRLSEIKPLHNFLTQLQPFLKLKQKQANLVLKIIEQLPSAKESPDKFLEVCTWVDQIAALNDSKTRKTTSETVRAVLDSLPGSVGGLSPSQASSAASSASSSPGSGISEALRAGAGSGTGYNKEFLLYLAGFVDGDGSICASIRPCQVAKFKHALELRFTVGQHTKRRWFLDKLVDQIGVGYVYDLGRITQYNLSQIKPLHNFLTQLQPFLKLKQKQANLVLKIIEQLPSAKESPDKFLEVCTWVDQIAALNDSHTRKTTSETVRAVLDSLSEKKKSSP

SEQ ID NO: 112 - protein, 354 aa, Artificial Sequence
  Synthesized
MNTKYNKEFLLYLAGFVDGDGSIYATIAPKQQLKFKHQLQLVFVVAQKTRRRWFLDKLVDEIGVGYVHDYGRASYYRLSQIKPLHNFLTQLQPFLKLKQKQANLVLKIIEQLPSAKESPDKFLEVCTWVDQIAALNDSKTRKTTSETVRAVLDSLPGSVGGLSPSQASSAASSASSSPGSGISEALRAGAGSGTGYNKEFLLYLAGFVDADGSICASIRPCQVAKFKHALELRFTVGQLTERRWFLDKLVDEIGVGYVYDLGRVAQYNLSQIKPLHNFLTQLQPFLKLKQKQANLVLKIIEQLPSAKESPDKFLEVCTWVDQIAALNDSKTRKTTSETVRAVLDSLSEKKKSSP

SEQ ID NO: 113 - protein, 354 aa, Artificial Sequence
  Synthesized
MNTKYNKEFLLYLAGFVDGDGSIYATIAPKQQLKFKHQLQLVFVVAQKTRRRWFLDKLVDEIGVGYVHDYGRASYYRLSQIKPLHNFLTQLQPFLKLKQKQANLVLKIIEQLPSAKESPDKFLEVCTWVDQIAALNDSKTRKTTSETVRAVLDSLPGSVGGLSPSQASSAASSASSSPGSGISEALRAGAGSGTGYNKEFLLYLAGFVDADGSICASIRPCQVAKFKHALELRFTVGQKTKRRWFLDKLVDEIGVGYVYDLGSISQYNLSQIKPLHNFLTQLQPFLKLKQKQANLVLKIIEQLPSAKESPDKFLEVCTWVDQIAALNDSATRKTTSETVRAVLDSLSEKKKSSP

SEQ ID NO: 114 - protein, 354 aa, Artificial Sequence
  Synthesized
MNTKYNKEFLLYLAGFVDGDGSIYATIAPKQQLKFKHQLQLVFVVAQLTRRRWFLDKLVDEIGVGYVHDYGRASYYRLSQIKPLHNFLTQLQPFLKLKQKQANLVLKIIEQLPSAKESPDKFLEVCTWVDQIAALNDSKTRKTTSETVRAVLDSLPGSVGGLSPSQASSAASSASSSPGSGISEALRAGAGSGTGYNKEFLLYLAGFVDADGSICASIRPCQVAKFKHALELRFTVGQLTKRRWFLDKLVDEIGVGYVYDLGGIAQYNLSQIKPLHNFLTQLQPFLKLKQKQANLVLKIIEQLPSAKESPDKFLEVCTWVDQIAALNDSRTRKTTSETVRAVLDSLSEKKKSSP

SEQ ID NO: 115 - protein, 354 aa, Artificial Sequence
  Synthesized
MNTKYNKEFLLYLAGFVDADGSIYATIAPKQQLKFKHQLQLVFVVAQKTRRRWFLDKLVDEIGVGYVHDYGRASYYRLSQIKPLHNFLTQLQPFLKLKQKQANLVLKIIEQLPSAKESPDKFLEVCTWVDQIAALNDSKTRKTTSETVRAVLDSLPGSVGGLSPSQASSAASSASSSPGSGISEALRAGAGSGTGYNKEFLLYLAGFVDGDGSICASIRPCQVAKFKHALELRFTVGQNTSRRWFLDKLVDEIGVGYVYDLGRISQYNLSQIKPLHNFLTQLQPFLKLKQKQANLVLKIIEQLPSAKESPDKFLEVCTWVDQIAALNDSRTRKTTSETVRAVLDSLSEKKKSSP

SEQ ID NO: 116 - protein, 354 aa, Artificial Sequence
  Synthesized
MNTKYNKEFLLYLAGFVDSDGSIYATIAPKQQLKFKHQLQLVFVVAQKTRRRWFLDKLVDEIGVGYVHDYGRASYYRLSQIKPLHNFLTQLQPFLKLKQKQANLVLKIIEQLPSAKESPDKFLEVCTWVDQIAALNDSKTRKTTSETVRAVLDSLPGSVGGLSPSQASSAASSASSSPGSGISEALRAGAGSGTGYNKEFLLYLAGFVDGDGSICASIRPCQVAKFKHALELRFTVGQKTIRRWFLDKLVDEIGVGYVYDLGRIAQYNLSEIKPLHNFLTQLQPFLKLKQKQANLVLKIIEQLPSAKESPDKFLEVCTWVDQIAALNDSRTRKTTSETVRAVLDSLSEKKKSSP

SEQ ID NO: 117 - protein, 354 aa, Artificial Sequence
  Synthesized
MNTKYNKEFLLYLAGFVDADGSIYATIAPKQQLKFKHQLQLVFVVAQKTCRRWFLDKLVDEIGVGYVHDYGRASYYRLSQIKPLHNFLTQLQPFLKLKQKQANLVLKIIEQLPSAKESPDKFLEVCTWVDQIAALNDSKTRKTTSETVRAVLDSLPGSVGGLSPSQASSAASSASSSPGSGISEALRAGAGSGTGYNKEFLLYLAGFVDGDGSICASIRPCQVAKFKHALELRFTVGQHTRRRWFLDKLVDEIGVGYVYDLGRCAQYNLSEIKPLHNFLTQLQPFLKLKQKQANLVLKIIEQLPSAKESPDKFLEVCTWVDQIAALNDSHTRKTTSETVRAVLDSLSEKKKSSP

SEQ ID NO: 118 - protein, 354 aa, Artificial Sequence
  Synthesized
MNTKYNKEFLLYLAGFVDGDGSIYATIAPKQQLKFKHQLQLVFVVAQKTRRRWFLDKLVDEIGVGYVHDYGRASYYRLSQIKPLHNFLTQLQPFLKLKQKQANLVLKIIEQLPSAKESPDKFLEVCTWVDQIAALNDSKTRKTTSETVRAVLDSLPGSVGGLSPSQASSAASSASSSPGSGISEALRAGAGSGTGYNKEFLLYLAGFVDADGSICASIRPCQVAKFKHALELRFTVGQATKRRWFLDKLVDEIGVGYVYDLGWIAQYNLSEIKPLHNFLTQLQPFLKLKQKQANLVLKIIEQLPSAKESPDKFLEVCTWVDQIAALNDSKTRKTTSETVRAVLDSLSEKKKSSP

SEQ ID NO: 119 - DNA, 22 bp, Artificial Sequence
  Synthesized
gtatagcatacggtatacgaag

SEQ ID NO: 120 - DNA, 22 bp, Artificial Sequence
  Synthesized
catatcgtatgccatatgcttc

SEQ ID NO: 121 - protein, 355 aa, Artificial Sequence
  Synthesized
MNTKYNKEFLLYLAGFVDGDGSIYATIAPKQQLKFKHQLQLVFVVAQKTRRRWFLDKLVDEIGVGYVHDYGRASYYRLSQIKPLHNFLTQLQPFLKLKQKQANLVLKIIEQLPSAKESPDKFLEVCTWVDQIAALNDSKTRKTTSETVRAVLDSLPGSVGGLSPSQASSAASSASSSPGSGISEALRAGAGSGTGYNKEFLLYLAGFVDADGSICASIRPCQVAKFKHALELRFTVGQKTRRRWFLDKLVDEIGVGYVYDLDGRRSQYNLSQIKPLHNFLTQLQPFLKLKQKQANLVLKIIEQLPSAKESPDKFLEVCTWVDQIAALNDSKTRKTTSETVRAVLDSLSEKKKSSP

SEQ ID NO: 122 - protein, 355 aa, Artificial Sequence
  Synthesized
MNTKYNKEFLLYLAGFVDGDGSIYATIAPKQQLKFKHQLQLVFVVAQKTKRRWLLDKLVDEIGVGYVHDYGRASYYRLSQIKPLHNFLTQLQPFLKLKQKQANLVLKIIEQLPSAKESPDKFLEVCTWVDQIAALNDSKTRKTTSETVRAVLDSLPGSVGGLSPSQASSAASSASSSPGSGISEALRAGAGSGTGYNKEFLLYLAGFVDADGSICASIRPCQVAKFKHALELRFTVGQKTRRRWFLDKLVDEIGVGYVYDLDGRRSQYNLSQIKPLHNFLTQLQPFLKLKQKQANLVLKIIEQLPSAKESPDKFLEVCTWVDQIAALNDSKTRKTTSETVRAVLDSLSEKKKSSP

SEQ ID NO: 123 - protein, 355 aa, Artificial Sequence; identical to SEQ ID NO: 121
  Synthesized

SEQ ID NO: 124 - protein, 355 aa, Artificial Sequence; identical to SEQ ID NO: 121
  Synthesized

SEQ ID NO: 125 - protein, 355 aa, Artificial Sequence; identical to SEQ ID NO: 121
  Synthesized

SEQ ID NO: 126 - protein, 355 aa, Artificial Sequence; identical to SEQ ID NO: 121
  Synthesized

SEQ ID NO: 127 - protein, 355 aa, Artificial Sequence; identical to SEQ ID NO: 121
  Synthesized

SEQ ID NO: 128 - protein, 355 aa, Artificial Sequence
  Synthesized
MNTKYNKEFLLYLAGFVDGDGSIYATIAPKQQLKFKHQLQLVFVVAQKTRRRWFLDKLVDEIGVGYVHDYGRASYYRLSQIKPLHNFLTQLQPFLKLKQKQANLVLKIIEQLPSAKESPDKFLEVCTWVDQIAALNDSKTRKTTSETVRAVLDSLPGSVGGLSPSQASSAASSASSSPGSGISEALRAGAGSGTGYNKEFLLFLAGFVDADGSICASIRPRQVAKFKHALELRFTVGQKTPRRWFLDKLVDEIGVGYVYDLDGRRSQYNLSQIKPLHNFLTQLQPFLKLKQKQANLVLKIIEQLPSAKESPDKFLEVCTWVDQIAALNDSKTRKTTSETVRAVLDSLSEKKKSSP

SEQ ID NO: 129 - protein, 355 aa, Artificial Sequence; identical to SEQ ID NO: 121
  Synthesized

SEQ ID NO: 130 - protein, 355 aa, Artificial Sequence; identical to SEQ ID NO: 121
  Synthesized

SEQ ID NO: 131 - protein, 355 aa, Artificial Sequence; identical to SEQ ID NO: 121
  Synthesized

SEQ ID NO: 132 - protein, 355 aa, Artificial Sequence; identical to SEQ ID NO: 121
  Synthesized

SEQ ID NO: 133 - protein, 355 aa, Artificial Sequence; identical to SEQ ID NO: 121
  Synthesized

SEQ ID NO: 134 - protein, 355 aa, Artificial Sequence
  Synthesized
MNTKYNKEFLLYLAGFVDGDGSIYATIAPKQQLKFKHQLQLVFVVAQKTRRRWFLDKLVDEIGVGYVHDYGRASYYRLSQIKPLHNFLTQLQPFLKLKQKQANLVLKIIEQLPSAKESPDKFLEVCTWVDQIAALNDSKTRKTTSETVRAVLDSLPGSVGGLSPSQASSAASSASSSPGSGIFEALRGGAGSGTGYNKEFLLFLAGFVVAYGSICASIRPRQVVKFKHPLEVRFTVGQKTPRRWFLVNMVEEIGVGYVYDLDGGRSQYNLSQIKPLHNFLTQLQPFLKLKQKQANLVLKIIEQLPSAKESPDKFLEVCTWVDQIAALNDSKTRKTTSETVRAVLDSLSEKKKSSP

SEQ ID NO: 135 - protein, 355 aa, Artificial Sequence; identical to SEQ ID NO: 121
  Synthesized

SEQ ID NO: 136 - DNA, 22 bp, Artificial Sequence
  Synthesized
gtatagcatacgttatacgaag

SEQ ID NO: 137 - DNA, 22 bp, Artificial Sequence
  Synthesized
catatcgtatgcaatatgcttc

SEQ ID NO: 138 - protein, 354 aa, Artificial Sequence
  Synthesized
MNTKYNKEFLLYLAGFVDGDGSIYATIAPKQQLKFKHQLQLVFVVAQLTRRRWFLDKLVDEIGVGYVHDYGRASYYRLSQIKPLHNFLTQLQPFLKLKQKQANLVLKIIEQLPSAKESPDKFLEVCTWVDQIAALNDSKTRKTTSETVRAVLDSLPGSVGGLSPSQASSAASSASSSPGSGISEALRAGAGSGTGYNKEFLLYLAGFVDADGSICASIRPCQVAKFKHALELRFTVGQKTCRRWFLDKLVDEIGVGYVYDLPRCSQYNLSQIKPLHNFLTQLQPFLKLKQKQANLVLKIIEQLPSAKESPDKFLEVCTWVDQIAALNDSKTRKTTSETVRAVLDSLSEKKKSSP

SEQ ID NO: 139 - protein, 354 aa, Artificial Sequence
  Synthesized
MNTKYNKEFLLYLAGFVDADGSIYATIAPKQQLKFKHQLQLVFVVAQKTRRRWFLDKLVDEIGVGYVHDYGRASYYRLSQIKPLHNFLTQLQPFLKLKQKQANLVLKIIEQLPSAKESPDKFLEVCTWVDQIAALNDSKTRKTTSETVRAVLDSLPGSVGGLSPSQASSAASSASSSPGSGISEALRAGAGSGTGYNKEFLLYLAGFVDGDGSICASIRPCQVAKFKHALELRFTVGQLTCRRWFLDKLVDEIGVGYVYDLGKASQYNLSQIKPLHNFLTQLQPFLKLKQKQANLVLKIIEQLPSAKESPDKFLEVCTWVDQIAALNDSKTRKTTSETVRAVLDSLSEKKKSSP

SEQ ID NO: 140 - protein, 354 aa, Artificial Sequence
  Synthesized
MNTKYNKEFLLYLAGFVDADGSIYATIAPKQQLKFKHQLQLVFVVAQKTRRRWFLDKLVDEIGVGYVHDYGRASYYRLSQIKPLHNFLTQLQPFLKLKQKQANLVLKIIEQLPSAKESPDKFLEVCTWVDQIAALNDSKTRKTTSETVRAVLDSLPGSVGGLSPSQASSAASSASSSPGSGISEALRAGAGSGTGYNKEFLLYLAGFVDGDGSICASIRPCQVAKFKHALELRFTVGQSTQRRWFLDKLVDEIGVGYVYDLGAASQYNLSQIKPLHNFLTQLQPFLKLKQKQANLVLKIIEQLPSAKESPDKFLEVCTWVDQIAALNDSKTRKTTSETVRAVLDSLSEKKKSSP

SEQ ID NO: 141 - protein, 354 aa, Artificial Sequence
  Synthesized
MNTKYNKEFLLYLAGFVDADGSIYATIAPKQQLKFKHQLQLVFVVAQKTCRRWFLDKLVDEIGVGYVHDYGRASYYRLSQIKPLHNFLTQLQPFLKLKQKQANLVLKIIEQLPSAKESPDKFLEVCTWVDQIAALNDSKTRKTTSETVRAVLDSLPGSVGGLSPSQASSAASSASSSPGSGISEALRAGAGSGTGYNKEFLLYLAGFVDGDGSICASIRPCQVAKFKHALELRFTVGQSTERRWFLDKLVDEIGVGYVYDLGKAAQYNLSQIKPLHNFLTQLQPFLKLKQKQANLVLKIIEQLPSAKESPDKFLEVCTWVDQIAALNDSKTRKTTSETVRAVLDSLSEKKKSSP

SEQ ID NO: 142 - protein, 354 aa, Artificial Sequence
  Synthesized
MNTKYNKEFLLYLAGFVDGDGSIYATIAPKQQLKFKHQLQLVFVVAQKTRRRWFLDKLVDEIGVGYVHDYGRASYYRLSEIKPLHNFLTQLQPFLKLKQKQANLVLKIIEQLPSAKESPDKFLEVCTWVDQIAALNDSKTRKTTSETVRAVLDSLPGSVGGLSPSQASSAASSASSSPGSGISEALRAGAGSGTGYNKEFLLYLAGFVDADGSICASIRPCQVAKFKHALELRFTVGQKTCRRWFLDKLVDEIGVGYVYDLPKCAQYNLSQIKPLHNFLTQLQPFLKLKQKQANLVLKIIEQLPSAKESPDKFLEVCTWVDQIAALNDSKTRKTTSETVRAVLDSLSEKKKSSP

SEQ ID NO: 143 - protein, 354 aa, Artificial Sequence
  Synthesized
MNTKYNKEFLLYLAGFVDADGSIYATIAPKQQLKFKHQLQLVFVVAQKTRRRWFLDKLVDEIGVGYVHDYGRASYYRLSEIKPLHNFLTQLQPFLKLKQKQANLVLKIIEQLPSAKESPDKFLEVCTWVDQIAALNDSKTRKTTSETVRAVLDSLPGSVGGLSPSQASSAASSASSSPGSGISEALRAGAGSGTGYNKEFLLYLAGFVDGDGSICASIRPCQVAKFKHALELRFTVGQSTCRRWFLDKLVDEIGVGYVYDLGKASQYNLSQIKPLHNFLTQLQPFLKLKQKQANLVLKIIEQLPSAKESPDKFLEVCTWVDQIAALNDSKTRKTTSETVRAVLDSLSEKKKSSP

SEQ ID NO: 144 - protein, 354 aa, Artificial Sequence
  Synthesized
MNTKYNKEFLLYLAGFVDGDGSIYATIAPKQQLKFKHQLQLVFVVAQKTSRRWFLDKLVDEIGVGYVHDYGRASYYRLSQIKPLHNFLTQLQPFLKLKQKQANLVLKIIEQLPSAKESPDKFLEVCTWVDQIAALNDSKTRKTTSETVRAVLDSLPGSVGGLSPSQASSAASSASSSPGSGISEALRAGAGSGTGYNKEFLLYLAGFVDADGSICASIRPCQVAKFKHALELRFTVGQKTERRWFLDKLVDEIGVGYVYDLTRCAQYNLSQIKPLHNFLTQLQPFLKLKQKQANLVLKIIEQLPSAKESPDKFLEVCTWVDQIAALNDSKTRKTTSETVRAVLDSLSEKKKSSP

SEQ ID NO: 145 - protein, 354 aa, Artificial Sequence
  Synthesized
MNTKYNKEFLLYLAGFVDGDGSIYATIAPKQQLKFKHQLQLVFVVAQKTSRRWFLDKLVDEIGVGYVHDYGRASYYRLSQIKPLHNFLTQLQPFLKLKQKQANLVLKIIEQLPSAKESPDKFLEVCTWVDQIAALNDSKTRKTTSETVRAVLDSLPGSVGGLSPSQASSAASSASSSPGSGISEALRAGAGSGTGYNKEFLLYLAGFVDADGSICASIRPCQVAKFKHALELRFTVGQKTCRRWFLDKLVDEIGVGYVYDLAKCAQYNLSQIKPLHNFLTQLQPFLKLKQKQANLVLKIIEQLPSAKESPDKFLEVCTWVDQIAALNDSKTRKTTSETVRAVLDSLSEKKKSSP

SEQ ID NO: 146 - protein, 354 aa, Artificial Sequence
  Synthesized
MNTKYNKEFLLYLAGFVDADGSIYATIAPKQQLKFKHQLQLVFVVAQKTRRRWFLDKLVDEIGVGYVHDYGRASYYRLSQIKPLHNFLTQLQPFLKLKQKQANLVLKIIEQLPSAKESPDKFLEVCTWVDQIAALNDSKTRKTTSETVRAVLDSLPGSVGGLSPSQASSAASSASSSPGSGISEALRAGAGSGTGYNKEFLLYLAGFVDGDGSICASIRPCQVAKFKHALELRFTVGQSTERRWFLDKLVDEIGVGYVYDLGRAAQYNLSQIKPLHNFLTQLQPFLKLKQKQANLVLKIIEQLPSAKESPDKFLEVCTWVDQIAALNDSKTRKTTSETVRAVLDSLSEKKKSSP

SEQ ID NO: 147 - protein, 354 aa, Artificial Sequence
  Synthesized
MNTKYNKEFLLYLAGFVDGDGSIYATIAPKQQLKFKHQLQLVFVVAQLTRRRWFLDKLVDEIGVGYVHDYGRASYYRLSQIKPLHNFLTQLQPFLKLKQKQANLVLKIIEQLPSAKESPDKFLEVCTWVDQIAALNDSRTRKTTSETVRAVLDSLPGSVGGLSPSQASSAASSASSSPGSGISEALRAGAGSGTGYNKEFLLYLAGFVDADGSICASIRPCQVAKFKHALELRFTVGQKTERRWFLDKLVDEIGVGYVYDLGRAAQYNLSQIKPLHNFLTQLQPFLKLKQKQANLVLKIIEQLPSAKESPDKFLEVCTWVDQIAALNDSKTRKTTSETVRAVLDSLSEKKKSSP

SEQ ID NO: 148 - protein, 354 aa, Artificial Sequence
  Synthesized
MNTKYNKEFLLYLAGFVDADGSIYATIAPKQQLKFKHQLQLVFVVAQKTRRRWFLDKLVDEIGVGYVHDYGRASYYRLSQIKPLHNFLTQLQPFLKLKQKQANLVLKIIEQLPSAKESPDKFLEVCTWVDQIAALNDSKTRKTTSETVRAVLDSLPGSVGGLSPSQASSAASSASSSPGSGISEALRAGAGSGTGYNKEFLLYLAGFVDGDGSICASIRPCQVAKFKHALELRFTVGQKTERRWFLDKLVDEIGVGYVYDLRRAAQYNLSQIKPLHNFLTQLQPFLKLKQKQANLVLKIIEQLPSAKESPDKFLEVCTWVDQIAALNDSRTRKTTSETVRAVLDSLSEKKKSSP

SEQ ID NO: 149 - protein, 354 aa, Artificial Sequence
  Synthesized
MNTKYNKEFLLYLAGFVDGDGSIYATIAPKQQLKFKHQLQLVFVVAQKTCRRWFLDKLVDEIGVGYVHDYGRASYYRLSQIKPLHNFLTQLQPFLKLKQKQANLVLKIIEQLPSAKESPDKFLEVCTWVDQIAALNDSKTRKTTSETVRAVLDSLPGSVGGLSPSQASSAASSASSSPGSGISEALRAGAGSGTGYNKEFLLYLAGFVDADGSICASIRPCQVAKFKHALELRFTVGQSTERRWFLDKLVDEIGVGYVYDLGKCTQYNLSQIKPLHNFLTQLQPFLKLKQKQANLVLKIIEQLPSAKESPDKFLEVCTWVDQIAALNDSKTRKTTSETVRAVLDSLSEKKKSSP

SEQ ID NO: 150 - protein, 354 aa, Artificial Sequence
  Synthesized
MNTKYNKEFLLYLAGFVDGDGSIYATIAPKQQLKFKHQLQLVFVVAQKTRRRWFLDKLVDEIGVGYVHDYGRASYYRLSQIKPLHNFLTQLQPFLKLKQKQANLVLKIIEQLPSAKESPDKFLEVCTWVDQIAALNDSKTRKTTSETVRAVLDSLPGSVGGLSPSQASSAASSASSSPGSGISEALRAGAGSGTGYNKEFLLYLAGFVDADGSICASIRPCQVAKFKHALELRFTVGQSTERRWFLDKLVDEIGVGYVYDLGKCTQYNLSQIKPLHNFLTQLQPFLKLKQKQANLVLKIIEQLPSAKESPDKFLEVCTWVDQIAALNDSKTRKTTSETVRAVLDSLSEKKKSSP

SEQ ID NO: 151 - protein, 354 aa, Artificial Sequence
  Synthesized
MNTKYNKEFLLYLAGFVDADGSIYATIAPKQQLKFKHQLQLVFVVAQSTRRRWFLDKLVDEIGVGYVHDYGRASYYRLSQIKPLHNFLTQLQPFLKLKQKQANLVLKIIEQLPSAKESPDKFLEVCTWVDQIAALNDSKTRKTTSETVRAVLDSLPGSVGGLSPSQASSAASSASSSPGSGISEALRAGAGSGTGYNKEFLLYLAGFVDGDGSICASIRPCQVAKFKHALELRFTVGQLTERRWFLDKLVDEIGVGYVYDLGRCAQYNLSQIKPLHNFLTQLQPFLKLKQKQANLVLKIIEQLPSAKESPDKFLEVCTWVDQIAALNDSKTRKTTSETVRAVLDSLSEKKKSSP

SEQ ID NO: 152 - protein, 354 aa, Artificial Sequence
  Synthesized
MNTKYNKEFLLYLAGFVDADGSIYATIAPKQQLKFKHQLQLVFVVAQHTRRRWFLDKLVDEIGVGYVHDYGRASYYRLSQIKPLHNFLTQLQPFLKLKQKQANLVLKIIEQLPSAKESPDKFLEVCTWVDQIAALNDSKTRKTTSETVRAVLDSLPGSVGGLSPSQASSAASSASSSPGSGISEALRAGAGSGTGYNKEFLLYLAGFVDGDGSICASIRPCQVAKFKHALELRFTVGQKTERRWFLDKLVDEIGVGYVYDLGRASQYNLSEIKPLHNFLTQLQPFLKLKQKQANLVLKIIEQLPSAKESPDKFLEVCTWVDQIAALNDSKTRKTTSETVRAVLDSLSEKKKSSP

SEQ ID NO: 153 - protein, 354 aa, Artificial Sequence
  Synthesized
MNTKYNKEFLLYLAGFVDGDGSIYATIAPKQQLKFKHQLQLVFVVAQKTVRRWFLDKLVDEIGVGYVHDYGRASYYRLSQIKPLHNFLTQLQPFLKLKQKQANLVLKIIEQLPSAKESPDKFLEVCTWVDQIAALNDSKTRKTTSETVRAVLDSLPGSVGGLSPSQASSAASSASSSPGSGISEALRAGAGSGTGYNKEFLLYLAGFVDADGSICASIRPCQVAKFKHALELRFTVGQSTARRWFLDKLVDEIGVGYVYDLGRAAQYNLSQIKPLYNFLTQLQPFLKLKQKQANLVLKIIEQLPSAKESPDKFLEVCTWVDQIAALNDSKTRKTTSETVRAVLDSLSEKKKSSP

SEQ ID NO: 154 - protein, 354 aa, Artificial Sequence
  Synthesized
MNTKYNKEFLLYLAGFVDADGSIYATIAPKQQLKFKHQLQLVFVVAQKTCRRWFLDKLVDEIGVGYVHDYGRASYYRLSQIKPLHNFLTQLQPFLKLKQKQANLVLKIIEQLPSAKESPDKFLEVCTWVDQIAALNDSKTRKTTSETVRAVLDSLPGSVGGLSPSQASSAASSASSSPGSGISEALRAGAGSGTGYNKEFLLYLAGFVDGDGSICASIRPCQVAKFKHALELRFTVGQSTARRWFLDKLVDEIGVGYVYDLGRAAQYNLSQIKPLHNFLTQLQPFLKLKQKQANLVLKIIEQLPSAKESPDKFLEVCTWVDQIAALNDSKTRKTTSETVRAVLDSLSEKKKSSP

SEQ ID NO: 155 - protein, 354 aa, Artificial Sequence
  Synthesized
MNTKYNKEFLLYLAGFVDADGSIYATIAPKQQLKFKHQLQLVFVVAQKTRRRWFLDKLVDEIGVGYVHDYGRASYYRLSQIKPLHNFLTQLQPFLKLKQKQANLVLKIIEQLPSAKESPDKFLEVCTWVDQIAALNDSKTRKTTSETVRAVLDSLPGSVGGLSPSQASSAASSASSSPGSGISEALRAGAGSGTGYNKEFLLYLAGFVDGDGSICASIRPCQVAKFKHALELRFTVGQKTERRWFLDKLVDEIGVGYVYDLNRCSQYNLSQIKPLHNFLTQLQPFLKLKQKQANLVLKIIEQLPSAKESPDKFLEVCTWVDQIAALNDSKTRKTTSETVRAVLDSLSEKKKSSP

SEQ ID NO: 156 - protein, 354 aa, Artificial Sequence
  Synthesized
MNTKYNKEFLLYLAGFVDADGSIYATIAPKQQLKFKHQLQLVFVVAQKTRRRWFLDKLVDEIGVGYVHDYGRASYYRLSQIKPLHNFLTQLQPFLKLKQKQANLVLKIIEQLPSAKESPDKFLEVCTWVDQIAALNDSKTRKTTSETVRAVLDSLPGSVGGLSPSQASSAASSASSSPGSGISEALRAGAGSGTGYNKEFLLYLAGFVDGDGSICASIRPCQVAKFKHALELRFTVGQKTCRRWFLDKLVDEIGVGYVYDLGKSSQYNLSQIKPLHNFLTQLQPFLKLKQKQANLVLKIIEQLPSAKESPDKFLEVCTWVDQIAALNDSKTRKTTSETVRAVLDSLSEKKKSSP

SEQ ID NO: 157 - DNA, 22 bp, Artificial Sequence
  Synthesized
gtatagcatataatatacgaag

SEQ ID NO: 158 - DNA, 22 bp, Artificial Sequence
  Synthesized
catatcgtatattatatgcttc

SEQ ID NO: 159 - protein, 354 aa, Artificial Sequence
  Synthesized
MNTKYNKEFLLYLAGFVDGDGSIYATIAPKQQLKFKHQLQLVFVVAQKTTRRWFLDKLVDEIGVGYVHDYGRASYYRLSEIKPLHNFLTQLQPFLKLKQKQANLVLKIIEQLPSAKESPDKFLEVCTWVDQIAALNDSRTRKTTSETVRAVLDSLPGSVGGLSPSQASSAASSASSSPGSGISEALRAGAGSGTGYNKEFLLYLAGFVDSDGSICASIRPCQVAKFKHALELRFTVGQSTRRRWFLDKLVDEIGVGYVYDLGTIAQYNLSEIKPLHNFLTQLQPFLKLKQKQANLVLKIIEQLPSAKESPDKFLEVCTWVDQIAALNDSKTRKTTSETVRAVLDSLSEKKKSSP

SEQ ID NO: 160 - protein, 354 aa, Artificial Sequence
  Synthesized
MNTKYNKEFLLYLAGFVDADGSIYATIAPKQQLKFKHQLQLVFVVAQATRRRWFLDKLVDEIGVGYVHDYGRASYYRLSQIKPLHNFLTQLQPFLKLKQKQANLVLKIIEQLPSAKESPDKFLEVCTWVDQIAALNDSRTRKTTSETVRAVLDSLPGSVGGLSPSQASSAASSASSSPGSGISEALRAGAGSGTGYNKEFLLYLAGFVDGDGSICASIRPCQVAKFKHALELRFTVGQTTRRRWFLDKLVDEIGVGYVYDLGRCAQYNLSEIKPLHNFLTQLQPFLKLKQKQANLVLKIIEQLPSAKESPDKFLEVCTWVDQIAALNDSRTRKTTSETVRAVLDSLSEKKKSSP

SEQ ID NO: 161 - protein, 354 aa, Artificial Sequence
  Synthesized
MNTKYNKEFLLYLAGFVDADGSIYATIAPKQQLKFKHQLQLVFVVAQHTTRRWFLDKLVDEIGVGYVHDYGRASYYRLSQIKPLHNFLTQLQPFLKLKQKQANLVLKIIEQLPSAKESPDKFLEVCTWVDQIAALNDSKTRKTTSETVRAVLDSLPGSVGGLSPSQASSAASSASSSPGSGISEALRAGAGSGTGYNKEFLLYLAGFVDGDGSICASIRPCQVAKFKHALELRFTVGQATKRRWFLDKLVDEIGVGYVYDLGQVAQYNLSQIKPLHNFLTQLQPFLKLKQKQANLVLKIIEQLPSAKESPDKFLEVCTWVDQIAALNDSRTRKTTSETVRAVLDSLSEKKKSSP

SEQ ID NO: 162 - protein, 354 aa, Artificial Sequence
  Synthesized
MNTKYNKEFLLYLAGFVDADGSIYATIAPKQQLKFKHQLQLVFVVAQATIRRWFLDKLVDEIGVGYVHDYGRASYYRLSQIKPLHNFLTQLQPFLKLKQKQANLVLKIIEQLPSAKESPDKFLEVCTWVDQIAALNDSKTRKTTSETVRAVLDSLPGSVGGLSPSQASSAASSASSSPGSGISEALRAGAGSGTGYNKEFLLYLAGFVDGDGSICASIRPCQVAKFKHALELRFTVGQKTERRWFLDKLVDEIGVGYVYDLGGVAQYNLSQIKPLHNFLTQLQPFLKLKQKQANLVLKIIEQLPSAKESPDKFLEVCTWVDQIAALNDSKTRKTTSETVRAVLDSLSEKKKSSP

SEQ ID NO: 163 - protein, 354 aa, Artificial Sequence
  Synthesized
MNTKYNKEFLLYLAGFVDADGSIYATIAPKQQLKFKHQLQLVFVVAQSTRRRWFLDKLVDEIGVGYVHDYGRASYYRLSEIKPLHNFLTQLQPFLKLKQKQANLVLKIIEQLPSAKESPDKFLEVCTWVDQIAALNDSRTRKTTSETVRAVLDGLPGSVGGLSPSQASSAASSASSSPGSGISEALRAGAGSGTGYNKEFLLYLAGFVDGDGSICASIRPCQVAKFKHALELRFTVGQKTERRWFLDKLVDEIGVGYVYDLKAIAQYNLSQIKPLHNFLTQLQPFLKLKQKQANLVLKIIEQLPSAKESPDKFLEVCTWVDQIAALNDSRTRKTTSETVRAVLDSLSEKKKSSP

SEQ ID NO: 164 - protein, 354 aa, Artificial Sequence
  Synthesized
MNTKYNKEFLLYLAGFVDADGSIYATIAPKQQLKFKHQLQLVFVVVQHTRRRWFLDKLVDEIGVGYVHDYGAASYYRLSQIKPLHNFLTQLQPFLKLKQEQANLVLKIIEQLPSAKESPDKFLEVCTWVDQIAALNDSKTRKTTSETVRAVLDSLPGSVGGLSPSQASSAASSASSSPGSGISEALRAGAGSGTGYNKEFLLYLAGFVDGDGSICASIRPCQVAKFKHALELRFTVGQATARRWFLDKLVDEIGVGYVYDLGGVAQYNLSQIKPLHNFLTQLQPFLKLKQKQANLVLKIIEQLPSAKESPDKFLEVCTWVDQIAALNDSRTRKTTSETVRAVLDSLSEKKKSSP

SEQ ID NO: 165 - protein, 354 aa, Artificial Sequence
  Synthesized
MNTKYNKEFLLYLAGFVDSDGSIYATIAPKQQLKFKHQLQLVFVVAQSTRRRWFLDKLVDEIGVGYVHDYKGTAYYRLSEIKPLHNFLTQLQPFLKLKQKQANLVLKIIEQLPSAKESPDKFLEVCTWVDQIAALNDSRTRKTTSETVRAVLDSLPGSVGGLSPSQASSAASSASSSPGSGISEALRAGAGSGTGYNKEFLLYLAGFVDGDGSICASIRPCQVAKFKHALELRFTVGQSTKRRWFLDKLVDEIGVGYVYDLGRIAQYNLSQIKPLHNFLTQLQPFLKLKQKQANLVLKIIEQLPSAKESPDKFLEVCTWVDQIAALNDSRTRKTTSETVRAVLDSLSEKKKSSP

SEQ ID NO: 166 - protein, 354 aa, Artificial Sequence
  Synthesized
MNTKYNKEFLLYLAGFVDADGSIYATIAPKQQLKFKHQLQLVFVVAQKTGRRWFLDKLVDEIGVGYVHDYGRASYYRLSQIKPLHNFLTQLQPFLKLKQKQANLVLKIIEQLPSAKESPDKFLEVCTWVDQIAALNDSKTRKTTSETVRAVLDSLPGSVGGLSPSQASSAASSASSSPGSGISEALRAGAGSGTGYNKEFLLYLAGFVDGDGSICASIRPCQVAKFKHALELRFTVGQATCRRWFLDKLADEIGVGYVYDLGRVSQYNLSQIKPLHNFLTQLQPFLKLKQKQANLVLKIIEQLPSAKESPDKFLEVCTWVDQIAALNDSRTRKTTSETVRAVLDSLSEKKKSSP

SEQ ID NO: 167 - protein, 354 aa, Artificial Sequence
  Synthesized
MNTKYNKEFLLYLAGFVDGDGSIYATIAPKQQLKFKHQLQLVFVVAQKTKRRWFLDKLVDEIGVGYVHDYSGASYYRLSQIKPLHNFLTQLQPFLKLKQKQANLVLKIIEQLPSAKESPDKFLEVCTWVDQIAALNDSRTRKTTSETVRAVLDSLPGSVGGLSPSQASSAASSASSSPGSGISEALRAGAGSGTGYNKEFLLYLAGFVDADGSICASIRPCQVAKFKHALELRFTVGQNTKRRWFLDKLVDEIGVGYVYDLGRIAQYNLSEIKPLHNFLTQLQPFLKLKQKQANLVLKIIEQLPSAKESPDKFLEVCTWVDQIAALNDSRTRKTTSETVRAVLDSLSEKKKSSP

SEQ ID NO: 168 - protein, 354 aa, Artificial Sequence
  Synthesized
MNTKYNKEFLLYLAGFVDGDGSIYATIAPKQQLKFKHQLQLVFVVAQKTRRRWFLDKLVDEIGVGYVHDYGRCSYYRLSEIKPLHNFLTQLQPFLKLKQKQANLVLKIIEQLPSAKESPDKFLEVCTWVDQIAALNDSKTRKTTSETVRAVLDSLPGSVGGLSPSQASSAASSASSSPGSGISEALRAGAGSGTGYNKEFLLYLAGFVDADGSICASIRPCQVAKFKHALELRFTVGQSTTRRWFLDKLVDEIGVGYVYDLGYVAQYNLSQIKPLHNFLTQLQPFLKLKQKQANLVLKIIEQLPSAKESPDKFLEVCTWVDQIAALNDSRTRKTTSETVRAVLDSLSEKKKSSP

SEQ ID NO: 169 - protein, 354 aa, Artificial Sequence
  Synthesized
MNTKYNKEFLLYLAGFVDADGSIYATIAPKQQLKFKHQLQLVFVVAQSTRRRWFLDKLVDEIGVGYVHDYHAASYYRLSQIKPLHNFLTQLQPFLKLKQKQANLVLKIIEQLPSAKESPDKFLEVCTWVDQIAALNDSRTRKTTSETVRAVLDSLPGSVGGLSPSQASSAASSASSSPGSGISEALRAGAGSGTGYNKEFLLYLAGFVDGDGSICASIRPCQVAKFKHALELRFTVGQSTRRRWFLDKLVDEIGVGYVYDLGRIAQYNLSEIKPLHNFLTQLQPFLKLKQKQANLVLKIIEQLPSAKESPDKFLEVCTWVDQIAALNDSRTRKTTSETVRAVLDSLSEKKKSSP

SEQ ID NO: 170 - protein, 354 aa, Artificial Sequence
  Synthesized
MNTKYNKEFLLYLAGFVDADGSIYATIAPKQQLKFKHQLQLVFVVAQKTDRRWFLDKLVDEIGVGYVHDYGRASYYRLSQIKPLHNFLTQLQPFLKLKQKQANLVLKIIEQLPSAKESPDKFLEVCTWVDQIAALNDSRTRKTTSETVRAVLDSLPGSVGGLSPSQASSAASSASSSPGSGISEALRAGAGSGTGYNKEFLLYLAGFVDGDGSICASIRPCQVAKFKHALELRFTVGQKTTRRWFLDKLVDEIGVGYVYDLSGVSQYNLSQIKPLHNFLTQLQPFLKLKQKQANLVLKIIEQLPSAKESPDKFLEVCTWVDQIAALNDSRTRKTTSETVRAVLDSLSEKKKSSP

SEQ ID NO: 171 - protein, 354 aa, Artificial Sequence
  Synthesized
MNTKYNKEFLLYLAGFVDADGSIYATIAPKQQLKFKHQLQLVFVVAQKTTRRWFLDKLVDEIGVGYVHDYNQAAYYRLSQIKPLHNFLTQLQPFLKLKQKQANLVLKIIEQLPSAKESPDKFLEVCTWVDQIAALNDSRTRKTTSETVRAVLDSLPGSVGGLSPSQASSAASSASSSPGSGISEALRAGAGSGTGYNKEFLLYLAGFVDGDGSICASIRPCQVAKFKHALELRFTVGQSTTRRWFLDKLVDEIGVGYVYDLGRIAQYNLSQIKPLHNFLTQLQPFLKLKQKQANLVLKIIEQLPSAKESPDKFLEVCTWVDQIAALNDSRTRKTTSETVRAVLDSLSEKKKSSP

SEQ ID NO: 172 - protein, 354 aa, Artificial Sequence
  Synthesized
MNTKYNKEFLLYLAGFVDADGSIYATIAPKQQLKFKHQLQLVFVVAQHTRRRWFLDKLVDEIGVGYVHDYGHCSYYRLSQIKPLHNFLTQLQPFLKLKQKQANLVLKIIEQLPSAKESPDKFLEVCTWVDQIAALNDSRTRKTTSETVRAVLDSLPGSVGGLSPSQASSAASSASSSPGSGISEALRAGAGSGTGYNKEFLLYLAGFVDGDGSICASIRPCQVAKFKHALELRFTVGQTTRRRWFLDKLVDEIGVGYVYDLGGISQYNLSEIKPLHNFLTQLQPFLKLKQKQANLVLKIIEQLPSAKESPDKFLEVCTWVDQIAALNDSRTRKTTSETVRAVLDSLSEKKKSSP

SEQ ID NO: 173 - protein, 354 aa, Artificial Sequence
  Synthesized
MNTKYNKEFLLYLAGFVDADGSIYATIAPKQQLKFKHQLQLVFVVAQKTCRRWFLDKLVDEIGVGYVHDYGLCSYYRLSEIKPLHNFLTQLQPFLKLKQKQANLVLKIIEQLPSAKESPDKFLEVCTWVDQIAALNDSKTRKTTSETVRAVLDSLPGSVGGLSPSQASSAASSASSSPGSGISEALRAGAGSGTGYNKEFLLYLAGFVDGDGSICASIRPCQVAKFKHALELRFTVGQSTKRRWFLDKLVDEIGVGYVYDLGRVTQYNLSQIKPLHNFLTQLQPFLKLKQKQANLVLKIIEQLPSAKESPDKFLEVCTWVDQIAALNDSRTRKTTSETVRAVLDSLSEKKKSSP

SEQ ID NO: 174 - protein, 354 aa, Artificial Sequence
  Synthesized
MNTKYNKEFLLYLAGFVDGDGSIYATIAPKQQLKFKHQLQLVFVVAQATCRRWFLDKLVDEIGVGYVHDYGRASYYRLSEIKPLHNFLTQLQPFLKLKQKQANLVLKIIEQLPSAKESPDKFLEVCTWVDQIAALNDSKTRKTTSETVRAVLDSLPGSVGGLSPSQASSAASSASSSPGSGISEALRAGAGSGTGYNKEFLLYLAGFVDADGSICASIRPCQVAKFKHALELRFTVGQKTKRRWFLDKLVDEIGVGYVYDLGSVSQYNLSQIKPLHNFLTQLQPFLKLKQKQANLVLKIIEQLPSAKESPDKFLEVCTWVDQIAALNDSRTRKTTSETVRAVLDSLSEKKKSSP

SEQ ID NO: 175 - protein, 354 aa, Artificial Sequence
  Synthesized
MNTKYNKEFLLYLAGFVDGDGSIYATIAPKQQLKFKHQLQLVFVVAQKTVRRWFLDKLVDEIGVGYVHDYGACSYYRLSEIKPLHNFLTQLQPFLKLKQKQANLVLKIIEQLPSAKESPDKFLEVCTWVDQIAALNDSRTRKTTSETVRAVLDSLPGSVGGLSPSQASSAAASASSSPGSGISEALRAGAGSGTGYNKEFLLYLAGFVDSDGSICASIRPCQVAKFKHALELRFTVGQSTKRRWFLDKLVDEIGVGYVYDLGNVSQYNLSQIKPLHNFLTQLQPFLKLKQKQANLVLKIIEQLPSAKESPDKFLEVCTWVDQIAALNDSRTRKTTSETVRAVLDSLSEKKKSSP

SEQ ID NO: 176 - protein, 354 aa, Artificial Sequence
  Synthesized
MNTKYNKEFLLYLAGFVDADGSIYATIAPKQQLKFKHQLQLVFVVAQATRRRWFLDKLVDEIGVGYVHDYGRASYYRLSQIKPLHNFLTQLQPFLKLKQKQANLVLKIIEQLPSAKESPDKFLEVCTWVDQIAALNDSRTRKTTSETVRAVLDSLPGSVGGLSPSQASSAASSASSSPGSGISEALRAGAGSGTGYNKEFLLYLAGFVDGDGSICASIRPCQVAKFKHALELRFTVGQSTRRRWFLDKLVDEIGVGYVYDLGSVSQYNLSEIKPLHNFLTQLQPFLKLKQKQANLVLKIIEQLPSAKESPDKFLEVCTWVDQIAALNDSKTRKTTSETVRAVLDSLSEKKKSSP

SEQ ID NO: 177 - protein, 354 aa, Artificial Sequence
  Synthesized
MNTKYNKEFLLYLAGFVDADGSIYATIAPKQQLKFKHQLQLVFVVAQKTCRRWFLDKLVDEIGVGYVHDYGSASYYRLSEIKPLHNFLTQLQPFLKLKQKQANLVLKIIEQLPSAKESPDKFLEVCTWVDQIAALNDSRTRKTTSETVRAVLDSLPGSVGGLSPSQASSAASSASSSPGSGISEALRAGAGSGTGYNKEFLLYLAGFVDGDGSICASIRPCQVAKFKHALELRFTVGQTTRRRWFLDKLVDEIGVGYVYDLGRCAQYNLSEIKPLHNFLTQLQPFLKLKQKQANLVLKIIEQLPSAKESPDKFLEVCTWVDQIAALNDSRTRKTTSETVRAVLDSLSEKKKSSP

SEQ ID NO: 178 - protein, 354 aa, Artificial Sequence
  Synthesized
MNTKYNKEFLLYLAGFVDADGSIYATIAPKQQLKFKHQLQLVFVVAQSTRRRWFLDKLVDEIGVGYVHDYHRCSYYRLSEIKPLHNFLTQLQPFLKLKQKQANLVLKIIEQLPSAKESPDKFLEVCTWVDQIAALNDSRTRKTTSETVRAVLDSLPGSVGGLSPSQASSAASSASSSPGSGISEALRAGAGSGTGYNKEFLLYLAGFVDGDGSICASIRPCQVAKFKHALELRFTVGQSTKRRWFLDKLVDEIGVGYVYDLGKVSQYNLSEIKPLHNFLTQLQPFLKLKQKQANLVLKIIEQLPSAKESPDKFLEVCTWVDQIAALNDSKTRKTTSETVRAVLDSLSEKKKSSP

SEQ ID NO: 179 - protein, 354 aa, Artificial Sequence
  Synthesized
MNTKYNKEFLLYLAGFVDSDGSIYATIAPKQQLKFKHQLQLVFVVAQKTKRRWFLDKLVDEIGVGYVHDYGRASYYRLSQIKPLHNFLTQLQPFLKLKQKQANLVLKIIEQLPSAKESPDKFLEVCTWVDQIAALNDSRTRKTTSETVRAVLDSLPGSVGGLSPSQASSAASSASSSPGSGISEALRAGAGSGTGYNKEFLLYLAGFVDGDGSICASIRPCQVAKFKHALELRFTVGQSTRRRWFLDKLVDEIGVGYVYDLGQVSQYNLSQIKPLHNFLTQLQPFLKLKQKQANLVLKIIEQLPSAKESPDKFLEVCTWVDQIAALNDSRTRKTTSETVRAVLDSLSEKKKSSP

SEQ ID NO: 180 - protein, 354 aa, Artificial Sequence
  Synthesized
MNTKYNKEFLLYLAGFVDADGSIYATIAPKQQLKFKHQLQLVFVVAQKTRRRWFLDKLVDEIGVGYVHDYGRASYYRLSQIKPLHNFLTQLQPFLKLKQKQANLVLKIIEQLPSAKESPDKFLEVCTWVDQIAALNDSKTRKTTSETVRAVLDSLPGSVGGLSPSQASSAASSASSSPGSGISEALRAGAGSGTGYNKEFLLYLAGFVDGDGSICASIRPCQVAKFKHALELRFTVGQSTKRRWFLDKLADEIGVGYVYDLRSIAQYNLSEIKPLHNFLTQLQPFLKLKQKQANLVLKIIEQLPSAKESPDKFLEVCTWVDQIAALNDSRTRKTTSETVRAVLDSLSEKKKSSP

SEQ ID NO: 181 - protein, 354 aa, Artificial Sequence
  Synthesized
MNTKYNKEFLLYLAGFVDADGSIYATIAPKQQLKFKHQLQLVFVVAQLTRRRWFLDKLVDEIGVGYVHDYGRASYYRLSQIKPLHNFLTQLQPFLKLKQKQANLVLKIIEQLPSAKESPDKFLEVCTWVDQIAALNDSKTRKTTSETVRAVLDSLPGSVGGLSPSQASSAASSASSSPGSGISEALRAGAGSGTGYNKEFLLYLAGFVDGDGSICASIRPCQVAKFKHALELRFTVGQKTTRRWFLDKLVDEIGVGYVYDLGSVSQYNLSEIKPLHNFLTQLQPFLKLKQKQANLVLKIIEQLPSAKESPDKFLEVCTWVDQIAALNDSRTRKTTSETVRAVLDSLSEKKKSSP

SEQ ID NO: 182 - protein, 354 aa, Artificial Sequence
  Synthesized
MNTKYNKEFLLYLAGFVDADGSIYATIAPKQQLKFKHQLQLVFVVAQSTQRRWFLDKLVDEIGVGYVHDYGRASYYRLSQIKPLHNFLTQLQPFLKLKQKQANLVLKIIEQLPSAKESPDKFLEVCTWVDQIAALNDSKTRKTTSETVRAVLDSLPGSVGGLSPSQASSAASSASSSPGSGISEALRAGAGSGTGYNKEFLLYLAGFVDGDGSICASIRPCQVAKFKHALELRFTVGQSTRRRWFLDKLVDEIGVGYVYDLGRVSQYNLSQIKPLHNFLTQLQPFLKLKQKQANLVLKIIEQLPSAKESPDKFLEVCTWVDQIAALNDSKTRKTTSETVRAVLDSLSEKKKSSP

SEQ ID NO: 183 - protein, 354 aa, Artificial Sequence
  Synthesized
MNTKYNKEFLLYLAGFVDGDGSIYATIAPKQQLKFKHQLQLVFVVAQQTRRRWFLDKLVDEIGVGYVHDYGRASYYRLSQIKPLHNFLTQLQPFLKLKQKQANLVLKIIEQLPSAKESPDKFLEVCTWVDQIAALNDSRTRKTTSETVRAVLDSLPGSVGGLSPSQASSAASSASSSPGSGISEALRAGAGSGTGYNKEFLLYLAGFVDADGSICASIRPCQVAKFKHALELRFTVSQSTKRRWFLDKLVDEIGVGYVYDLGYVAQYNLSQIKPLHNFLTQLQPFLKLKQKQANLVLKIIEQLPSAKEFPDKFLEVCTWVDQIAALNDSRTRKTTSETVRAVLDSLSEKKKSSP

SEQ ID NO: 184 - DNA, 22 bp, Artificial Sequence
  Synthesized
gtatagcatatagtatacgaag

SEQ ID NO: 185 - DNA, 22 bp, Artificial Sequence
  Synthesized
catatcgtatatcatatgcttc

SEQ ID NO: 186 - protein, 354 aa, Artificial Sequence
  Synthesized
MNTKYNKEFLLYLAGFVDADGSIYATIAPKQQLKFKHQLQLVFVVAQHTRRRWFLDKLVDEIGVGYVHDYGRASYYRLSQIKPLHNFLTQLQPFLKLKQKQANLVLKIIEQLPSAKESPDKFLEVCTWVDQIAALNDSKTRKTTSETVRAVLDSLPGSVGGLSPSQASSAASSASSSPGSGISEALRAGAGSGTGYNKEFLLYLAGFVDGDGSICASIRPCQVAKFKHALELRFTVGQKTCRRWFLDKLVDEIGVGYVYDLGGRSQYNLSQIKPLHNFLTQLQPFLKLKQKQANLVLKIIEQLPSAKESPDKFLEVCTWVDQIAALNDSKTRKTTSETVRAVLDSLSEKKKSSP

SEQ ID NO: 187 - protein, 354 aa, Artificial Sequence
  Synthesized
MNTKYNKEFLLYLAGFVDGDGSIYATIAPKQQLKFKHQLQLVFVVAQKTRRRWFLDKLVDEIGVGYVHDYGRASYYRLSQIKPLHNFLTQLQPFLKLKQKQANLVLKIIEQLPSAKESPDKFLEVCTWVDQIAALNDSRTRKTTSETVRAVLDSLPGSVGGLSPSQASSAASSASSSPGSGISEALRAGAGSGTGYNKEFLLYLAGFVDADGSICASIRPCQVAKFKHALELRFTVSQKTCRRWFLDKLVDEIGVGYVYDLGGRSQYNLSQIKPLHNFLTQLQPFLKLKQKQANLVLKIIEQLPSAKESPDKFLEVCTWVDQIAALNDSKTRKTTSETVRAVLDSLSEKKKSSP

SEQ ID NO: 188 - protein, 354 aa, Artificial Sequence
  Synthesized
MNTKYNKEFLLYLAGFVDADGSIYATIAPKQQLKFKHQLQLVFVVAQKTRRRWFLDKLVDEIGVGYVHDYGRASYYRLSQIKPLHNFLTQLQPFLKLKQKQANLVLKIIEQLPSAKESPDKFLEVCTWVDQIAALNDSKTRKTTSETVRAVLDSLPGSVGGLSPSQASSAASSASSSPGSGISEALRAGAGSGTGYNKEFLLYLAGFVDGDGSICASIRPCQVAKFKHALELRFTVGQKTCRRWFLDKLADEIGVGYVYDLGGRSQYNLSQIKPLHNFLTQLQPFLKLKQKQANLVLKIIEQLPSAKESPDKFLEVCTWVDQIAALNDSRTRKTTSETVRAVLDSLSEKKKSSP

SEQ ID NO: 189 - protein, 354 aa, Artificial Sequence
  Synthesized
MNTKYNKEFLLYLAGFVDADGSIYATIAPKQQLKFKHQLQLVFVVAQKTRRRWFLDKLVDEIGVGYVHDYGGASYYRLSQIKPLHNFLTQLQPFLKLKQKQANLVLKIIEQLPSAKESPDKFLEVCTWVDQIAALNDSKTRKTTSETVRAVLDSLPGSVGGLSPSQASSAASSASSSPGSGISEALRAGAGSGTGYNKEFLLYLAGFVDGDGSICASIRPCQVAKFKHALELRFTVGQKTCRRWFLDKLVDEIGVGYVYDLGGRSQYNLSQIKPLHNFLTQLQPFLKLKQKQANLVLKIIEQLPSAKESPDKFLEVCTWVDQIAALNDSKTRKTTSETVRAVLDSLSEKKKSSP

SEQ ID NO: 190 - protein, 354 aa, Artificial Sequence
  Synthesized
MNTKYNKEFLLYLAGFVDADGSIYATIAPKQQLKFKHQLQLVFVVAQKTRRRWFLDKLVDEIGVGYVHDYGSASYYRLSQIKPLHNFLTQLQPFLKLKQKQANLVLKIIEQLPSAKESPDKFLEVCTWVDQIAALNDSKTRKTTSETVRAVLDSLPGSVGGLSPSQASSAASSASSSPGSGISEALRAGAGSGTGYNKEFLLYLAGFVDGDGSICASIRPCQVAKFKHALELRFTVGQKTRRRWFLDKLADEIGVGYVYDLGGRSQYNLSQIKPLHNFLTQLQPFLKLKQKQANLVLKIIEQLPSAKESPDKFLEVCTWVDQIAALNDSRTRKTTSETVRAVLDSLSEKKKSSP

SEQ ID NO: 191 - protein, 354 aa, Artificial Sequence
  Synthesized
MNTKYNKEFLLYLAGFVDADGSIYATIAPKQQLKFKHQLQLVFVVAQKTRRRWFLDKLVDEIGVGYVHDYGRASYYRLSQIKPLHNFLTQLQPFLKLKQKQANLVLKIIEQLPSAKESPDKFLEVCTWVDQIAALNDSKTRKTTSETVRAVLDSLPGSVGGLSPSQASSAASSASSSPGSGISEALRAGAGSGTGYNKEFLLYLAGFVDGDGSICASIRPCQVAKFRHALELRFTVGQKTCRRWFLDKLADEIGVGYVYDLGSRSQYNLSQIKPLHNFLTQLQPFLKLKQKQANLVLKIIEQLPSAKESPDKFLEVCTWVDQIAALNDSRTRKTTSETVRAVLDSLSEKKKSSP

SEQ ID NO: 192 - protein, 354 aa, Artificial Sequence
  Synthesized
MNTKYNKEFLLYLAGFVDADGSIYATIAPKQQLKFKHQLQLVFVVAQKTRRRWFLDKLVDEIGVGYVHDYGGCSYYRLSQIKPLHNFLTQLQPFLKLKQKQANLVLKIIEQLPSAKESPDKFLEVCTWVDQIAALNDSRTRKTTSETVRAVLDSLPGSVGGLSPSQASSAASSASSSPGSGISEALRAVSGSGTGYNKEFLLYLAGFVDGDGSICASIRPCQVAKFKHALELRFTVGQKTCRRWFLDKLVDEIGVGYVYDLGGRSQYNLSQIKPLHNFLTQLQPFLKLKQKQANLVLKIIEQLPSAKESPDKFLEVCTWVDQIAALNDSRTRKTTSETVRAVLDSLSEKKKSSP

SEQ ID NO: 193 - protein, 354 aa, Artificial Sequence
  Synthesized
MNTKYNKEFLLYLAGFVDADGSIYATIAPKQQLKFKHQLQLVFVVAQKTRRRWFLDKLVDEIGVGYVHDYRACSYYRLSQIKPLHNFLTQLQPFLKLKQKQANLVLKIIEQLPSAKESPDKFLEVCTWVDQIAALNDSKTRKTTSETVRAVLDSLPGSVGGLSPSQASSAASSASSSPGSGISEALRAGAGSGTGYNKEFLLYLAGFVDGDGSICASIRPCQVAKFKHALELRFTVGQKTCRRWFLDKLVDEIGVGYVYDLGGRSQYNLSQIKPLHNFLTQLQPFLKLKQKQANLVLKIIEQLPSAKESPDKFLEVCTWVDQIAALNDSRTRKTTSETVRAVLDSLSEKKKSSP

SEQ ID NO: 194 - protein, 354 aa, Artificial Sequence
  Synthesized
MNTKYNKEFLLYLAGFVDADGSIYATIAPKQQLKFKHQLQLVFVVAQKTRRRWFLDKLVDEIGVGYVHDYGRASYYRLSQIKPLHNFLTQLQPFLKLKQKQANLVLKIIEQLPSAKESPDKFLEVCTWVDQIAALNDSKTRKTTSETVRAVLDSLPGSVGGLSPSQASSAASSASSSPGSGISEALRAGAGSGTGYNKEFLLYLAGFVDGDGSICASIRPCQVAKFKHALELRFTVGQKTCRRWFLDKLVDEIGVGYVYDLGGRSQYNLSQIKPLHNFLTQLQPFLKLKQKQANLVLKIIEQLPSAKESPDKFLEVCTWVDQIAALNDSRTRKTTSETVRAVLDSLSEKKKSSP

SEQ ID NO: 195 - protein, 354 aa, Artificial Sequence
  Synthesized
MNTKYNKEFLLYLAGFVDADGSIYATIAPKQQLKFKHQLQLVFVVAQHTRRRWFLDKLVDEIGVGYVHDYGRASYYRLSQIKPLHNFLTQLQPFLKLKQKQANLVLKIIEQLPSAKESPDKFLEVCTWVDQIAALNDSKTRKTTSETVRAVLDSLPGSVGGLSPSQASSAASSASSSPGSGISEALRAGAGSGTGYNKEFLLYLAGFVDGDGSICASIRPCQVAKFKHALELRFTVGQKTCRRWFLDKLADEIGVGYVYDLGGRSQYNLSQIKPLHNFLTQLQPFLKLKQKQANLVLKIIEQLPSAKESPDKFLEVCTWVDQIAALNDSKTRKTTSETVRAVLDSLSEKKKSSP

SEQ ID NO: 196 - protein, 354 aa, Artificial Sequence
  Synthesized
  misc_feature (241)..(241): Xaa can be any naturally occurring amino acid
MNTKYNKEFLLYLAGFVDADGSIYATIAPKQQLKFKHQLQLVFVVAQHTRRRWFLDKLVDEIGVGYVHDYGRASYYRLSQIKPLHNFLTQLQPFLKLKQKQANLVLKIIEQLPSAKESPDKFLEVCTWVDQIAALNDSKTRKTTSETVRAVLDSLPGSVGGLSPSQASSAASSASSSPGSGISEALRAGAGSGTGYNKEFLLYLAGFVDGDGSICASIRPCQVAKFKHALELRFTVGQKTXRRWFLDKLADEIGVGYVYDLGGRSQYNLSQIKPLHNFLTQLQPFLKLKQKQANLVLKIIEQLPSAKESPDKFLEVCTWVDQIAALNDSKTRKTTSETVRAVLDSLSEKKKSSP

SEQ ID NO: 197 - protein, 354 aa, Artificial Sequence
  Synthesized
MNTKYNKEFLLYLAGFVDADGSIYATIAPKQQLKFKHQLQLVFVVAQKTRRRWFLDKLVDEIGVGYVHDYGPASYYRLSQIKPLHNFLTQLQPFLKLKQKQANLVLKIIEQLPSAKESPDKFLEVCTWVDQIAALNDSKTRKTTSETVRAVLDSLPGSVGGLSPSQASSAASSASSSPGSGISEALRAGAGSGTGYNKEFLLYLAGFVDGDGSICASIRPCQVAKFKHALELRFTVGQKTCRRWFLDKLVDEIGVGYVYDLGGRSQYNLSQIKPLHNFLTQLQPFLKLKQKQANLVLKIIEQLPSAKESPDKFLEVCTWVDQIAALNDSRTRKTTSETVRAVLDSLSEKKKSSP

SEQ ID NO: 198 - protein, 354 aa, Artificial Sequence
  Synthesized
MNTKYNKEFLLYLAGFVDADGSIYATIAPKQQLKFKHQLQLVFVVAQHTRRRWFLDKLVDEIGVGYVHDYHQASYYRLSQIKPLHNFLTQLQPFLKLKQKQANLVLKIIEQLPSAKESPDKFLEVCTWVDQIAALNDSKTRKTTSETVRAVLDSLPGSVGGLSPSQASSAASSASSSPGSGISEALRAGAGSGTGYNKEFLLYLAGFVDGDGSICASIRPCQVAKFKHALELRFTVGQKTCRRWFLDKLADEIGVGYVYDLGGRSQYNLSQIKPLHNFLTQLQPFLKLKQKQANLVLKIIEQLPSAKESPDKFLEVCTWVDQIAALNDSRTRKTTSETVRAVLDSLSEKKKSSP

SEQ ID NO: 199 - protein, 354 aa, Artificial Sequence
  Synthesized
MNTKYNKEFLLYLAGFVDADGSIYATIAPKQQLKFKHQLQLVFVVAQKTRRRWFLDKLVDEIGVGYVHDYGRASYYRLSEIKPLHNFLTQLQPFLKLKQKQANLVLKIIEQLPSAKESPDKFLEVCTWVDQIAALNDSKTRKTTSETVRAVLDSLPGSVGGLSPSQASSAASSASSSPGSGISEALRAGAGSGTGYNKEFLLYLAGFVDGDGSICASIRPCQVAKFKHALELRFTVGQKTCRRWFLDKLADEIGVGYVYDLGGRSQYNLSQIKPLHNFLTQLQPFLKLKQKQANLVLKIIEQLPSAKESPDKFLEVCTWVDQIAALNDSRTRKTTSETVRAVLDSLSEKKKSSP

SEQ ID NO: 200 - DNA, 22 bp, Artificial Sequence
  Synthesized
gtatagcatatattatacgaag

SEQ ID NO: 201 - DNA, 22 bp, Artificial Sequence
  Synthesized
catatcgtatataatatgcttc

SEQ ID NO: 202 - protein, 354 aa, Artificial Sequence
  Synthesized
MNTKYNKEFLLYLAGFVDADGSIYATIAPKQQLKFKHQLQLVFVVAQHTNRRWFLDKLVDEIGVGYVHDYGRASYYRLSQIKPLHNFLTQLQPFLKLKQKQANLVLKIIEQLPSAKESPDKFLEVCTWVDQIAALNDSRTRKTTSETVRAVLDSLPGSVGGLSPSQASSAASSASSSPGSGISEALRAGAGSGTGYNKEFLLYLAGFVDGDGSICASIRPCQVAKFKHALELRFTVGQKTCRRWFLDKLVDEIGVGYVYDLKTCCQYNLSQIKPLHNFLTQLQPFLKLKQKQANLVLKIIEQLPSAKESPDKFLEVCTWVDQIAALNDSKTRKTTSETVRAVLDSLSEKKKSSP

SEQ ID NO: 203 - protein, 354 aa, Artificial Sequence
  Synthesized
MNTKYNKEFLLYLAGFVDGDGSIYATIAPKQQLKFKHQLQLVFVVAQHTCRRWFLDKLVDEIGVGYVHDYGRASYYRLSQIKPLHNFLTQLQPFLKLKQKQANLVLKIIEQLPSAKESPDKFLEVCTWVDQIAALNDSRTRKTTSETVRAVLDSLPGSVGGLSPSQASSAASSASSSPGSGISEALRAGAGSGTGYNKEFLLYLAGFVDADGSICASIRPCQVAKFKHALELRFTVGQHTKRRWFLDKLVDEIGVGYVYDLKACCQYNLSEIKPLHNFLTQLQPFLKLKQKQANLVLKIIEQLPSAKESPDKFLEVCTWVDQIAALNDSRTRKTTSETVRAVLDSLSEKKKSSP

SEQ ID NO: 204 - protein, 354 aa, Artificial Sequence
  Synthesized
MNTKYNKEFLLYLAGFVDADGSIYATIAPKQQLKFKHQLQLVFVVAQCTRRRWFLDKLVDEIGVGYVHDYGRASYYRLSQIKPLHNFLTQLQPFLKLKQKQANLVLKIIEQLPSAKESPDKFLEVCTWVDQIAALNDSRTRKTTSETVRAVLDSLPGSVGGLSPSQASSAASSASSSPGSGISEALRAGAGSGTGYNKEFLLYLAGFVDGDGSICASIRPCQVAKFKHALELRFTVGQATCRRWFLDKLVDEIGVGYVYDLKRCAQYNLSQIKPLHNFLTQLQPFLKLKQKQANLVLKIIEQLPSAKESPDKFLEVCTWVDQIAALNDSRTRKTTSETVRAVLDSLSEKKKSSP

SEQ ID NO: 205 - protein, 354 aa, Artificial Sequence
  Synthesized
MNTKYNKEFLLYLAGFVDADGSIYATIAPKQQLKFKHQLQLVFVVAQATRRRWFLDKLVDEIGVGYVHDYGRASYYRLSQIKPLHNFLTQLQPFLKLKQKQANLVLKIIEQLPSAKESPDKFLEVCTWVDQIAALNDSRTRKTTSETVRAVLDSLPGSVGGLSPSQASSAASSASSSPGSGISEALRAGAGSGTGYNKEFLLYLAGFVDGDGSICASIRPCQVAKFKHALELRFTVGQHTSRRWFLDKLVDEIGVGYVYDLKSASQYNLSQIKPLHNFLTQLQPFLKLKQKQANLVLKIIEQLPSAKESPDKFLEVCTWVDQIAALNDSRTRKTTSETVRAVLDSLSEKKKSSP

SEQ ID NO: 206 - protein, 354 aa, Artificial Sequence
  Synthesized
MNTKYNKEFLLYLAGFVDADGSIYATIAPKQQLKFKHQLQLVFVVAQKTRRRWFLDKLVDEIGVGYVHDYGRASYYRLSQIKPLHNFLTQLQPFLKLKQKQANLVLKIIEQLPSAKESPDKFLEVCTWVDQIAALNDSRTRKTTSETVRAVLDSLPGSVGGLSPSQASSAASSASSSPGSGISEALRAGAGSGTGYNKEFLLYLAGFVDGDGSICASIRPCQVAKFKHALELRFTVGQHTRRRWFLDKLVDEIGVGYVYDLERCCQYNLSQIKPLHNFLTQLQPFLKLKQKQANLVLKIIEQLPSAKESPDKFLEVCTWVDQIAALNDSRTRKTTSETVRAVLDSLSEKKKSSP

SEQ ID NO: 207 - protein, 354 aa, Artificial Sequence
  Synthesized
MNTKYNKEFLLYLAGFVDADGSIYATIAPKQQLKFKHQLQLVFVVAQATKRRWFLDKLVDEIGVGYVHDYGRASYYRLSQIKPLHNFLTQLQPFLKLKQKQANLVLKIIEQLPSAKESPDKFLEVCTWVDQIAALNDSRTRKTTSETVRAVLDSLPGSVGGLSPSQASSAASSASSSPGSGISEALRAGAGSGTGYNKEFLLYLAGFVDGDGSICASIRPCQVAKFKHALELRFTVGQHTKRRWFLDKLVDEIGVGYVYDLIKCCQYNLSQIKPLHNFLTQLQPFLKLKQKQANLVLKIIEQLPSAKESPDKFLEVCTWVDQIAALNDSRTRKTTSETVRAVLDSLSEKKKSSP

SEQ ID NO: 208 - protein, 354 aa, Artificial Sequence
  Synthesized
MNTKYNKEFLLYLAGFVDADGSIYATIAPKQQLKFKHQLQLVFVVAQATKRRWFLDKLVDEIGVGYVHDYGRASYYRLSQIKPLHNFLTQLQPFLKLKQKQANLVLKIIEQLPSAKESPDKFLEVCTWVDQIAALNDSRTRKTTSETVRAVLDSLPGSVGGLSPSQASSAASSASSSPGSGISEALRAGAGSGTGYNKEFLLYLAGFVDGDGSICASIRPCQVAKFKHALELRFTVGQATKRRWFLDKLVDEIGVGYVYDLGKCAQYNLSQIKPLHNFLTQLQPFLKLKQKQANLVLKIIEQLPSAKESPDKFLEVCTWVDQIAALNDSPTRKTTSETVRAVLDSLSEKKKSSP

SEQ ID NO: 209 - protein, 354 aa, Artificial Sequence
  Synthesized
MNTKYNKEFLLYLAGFVDADGSIYATIAPKQQLKFKHQLQLVFVVAQKTCRRWFLDKLVDEIGVGYVHDYGRASYYRLSQIKPLHNFLTQLQPFLKLKQKQANLVLKIIEQLPSAKESPDKFLEVCTWVDQIAALNDSKTRKTTSETVRAVLDSLPGSVGGLSPSQASSAASSASSSPGSGISEALRAGAGSGTGYNKEFLLYLAGFVDGDGSICASIRPCQVAKFKHALELRFTVGQKTCRRWFLDKLVDEIGVGYVYDLKACAQYNLSEIKPLHNFLTQLQPFLKLKQKQANLVLKIIEQLPSAKESPDKFLEVCTWVDQIAALNDSRTRKTTSETVRAVLDSLSEKKKSSP

SEQ ID NO: 210 - protein, 354 aa, Artificial Sequence
  Synthesized
MNTKYNKEFLLYLAGFVDADGSIYATIAPKQQLKFKHQLQLVFVVAQKTCRRWFLDKLVDEIGVGYVHDYGRASYYRLSQIKPLHNFLTQLQPFLKLKQKQANLVLKIIEQLPSAKESPDKFLEVCTWVDQIAALNDSRTRKTTSETVRAVLDSLPGSVGGLSPSQASSAASSASSSPGSGISEALRAGAGSGTGYNKEFLLYLAGFVDGDGSICASIRPCQVAKFKHALELRFTVGQHTQRRWFLDKLVDEIGVGYVYDLRKCCQYNLSQIKPLHNFLTQLQPFLKLKQKQANLVLKIIEQLPSAKESPDKFLEVCTWVDQIAALNDSNTRKTTSETVRAVLDSLSEKKKSSP

SEQ ID NO: 211 - protein, 354 aa, Artificial Sequence
  Synthesized
MNTKYNKEFLLYLAGFVDADGSIYATIAPKQQLKFKHQLQLVFVVAQKTSRRWFLDKLVDEIGVGYVHDYGRASYYRLSEIKPLHNFLTQLQPFLKLKQKQANLVLKIIEQLPSAKESPDKFLEVCTWVDQIAALNDSRTRKTTSETVRAVLDSLPGSVGGLSPSQASSAASSASSSPGSGISEALRAGAGSGTGYNKEFLLYLAGFVDGDGSICASIRPCQVAKFKHALELRFTVGQHTKRRWFLDKLVDEIGVGYVYDLEGCCQYNLSQIKPLHNFLTQLQPFLKLKQKQANLVLKIIEQLPSAKESPDKFLEVCTWVDQIAALNDSRTRKTTSETVRAVLDSLSEKKKSSP

SEQ ID NO: 212 - protein, 354 aa, Artificial Sequence
  Synthesized
MNTKYNKEFLLYLAGFVDADGSIYATIAPKQQLKFKHQLQLVFVVAQSTRRRWFLDKLVDEIGVGYVHDYHAASYYRLSQIKPLHNFLTQLQPFLKLKQKQANLVLKIIEQLPSAKESPDKFLEVCTWVDQIAALNDSRTRKTTSETVRAVLDSLPGSVGGLSPSQASSAASSASSSPGSGISEALRAGAGSGTGYNKEFLLYLAGFVDGDGSICASIRPCQVAKFKHALELRFTVGQATRRRWFLDKLVDEIGVGYVYDLRRCCQYNLSEIKPLHNFLTQLQPFLKLKQKQANLVLKIIEQLPSAKESPDKFLEVCTWVDQIAALNDSRTRKTTSETVRAVLDSLSEKKKSSP

SEQ ID NO: 213 - protein, 354 aa, Artificial Sequence
  Synthesized
MNTKYNKEFLLYLAGFVDADGSIYATIAPKQQLKFKHQLQLVFVVAQKTTRRWFLDKLVDEIGVGYVHDYINCSYYRLSQIKPLHNFLTQLQPFLKLKQKQANLVLKIIEQLPSAKESPDKFLEVCTWVDQIAALNDSRTRKTTSETVRAVLDSLPGSVGGLSPSQASSAASSASSSPGSGISEALRAGAGSGTGYNKEFLLYLAGFVDGDGSICASIRPCQVAKFKHALELRFTVGQSTNRRWFLDKLVDEIGVGYVYDLRGSCQYNLSQIKPLHNFLTQLQPFLKLKQKQANLVLKIIEQLPSAKESPDKFLEVCTWVDQIAALNDSKTRKTTSETVRAVLDSLSEKKKSSP

SEQ ID NO: 214 - protein, 354 aa, Artificial Sequence
  Synthesized
MNTKYNKEFLLYLAGFVDADGSIYATIAPKQQLKFKHQLQLVFVVAQDTKRRWFLDKLVDEIGVGYVHDYGRASYYRLSQIKPLHNFLTQLQPFLKLKQKQANLVLKIIEQLPSAKESPDKFLEVCTWVDQIAALNDSRTRKTTSETVRAVLDSLPGSVGGLSPSQASSAASSASSSPGSGISEALRAGAGSGTGYNKEFLLYLAGFVDGDGSICASIRPCQVAKFKHALELRFTVGQSTKRRWFLDKLVDEIGVGYVYDLRGGSQYNLSQIKPLHNFLTQLQPFLKLKQKQANLVLKIIEQLPSAKESPDKFLEVCTWVDQIAALNDSKTRKTTSETVRAVLDSLSEKKKSSP

SEQ ID NO: 215 - protein, 354 aa, Artificial Sequence
  Synthesized
  misc_feature (19)..(19): Xaa can be any naturally occurring amino acid
MNTKYNKEFLLYLAGFVDXDGSIYATIAPKQQLKFKHQLQLVFVVAQKTRRRWFLDKLVDEIGVGYVHDYGQSSYYRLSQIKPLHNFLTQLQPFLKLKQKQANLVLKIIEQLPSAKESPDKFLEVCTWVDQIAALNDSKTRKTTSETVRAVLDSLPGSVGGLSPSQASSAASSASSSPGSGISEALRAGAGSGTGYNKEFLLYLAGFVDGDGSICASIRPCQVAKFKHALELRFTVGQSTSRRWFLDKLVDEIGVGYVYDLGRCCQYNLSQIKPLHNFLTQLQPFLKLKQKQANLVLKIIEQLPSAKESPDKFLEVCTWVDQIAALNDSKTRKTTSETVRAVLDSLSEKKKSSP

SEQ ID NO: 216 - protein, 354 aa, Artificial Sequence
  Synthesized
MNTKYNKEFLLYLAGFVDADGSIYATIAPKQQLKFKHQLQLVFVVAQKTVRRWFLDKLVDEIGVGYVHDYGRASYYRLSQIKPLHNFLTQLQPFLKLKQKQANLVLKIIEQLPSAKESPDKFLEVCTWVDQIAALNDSSTRKTTSETVRAVLDSLPGSVGGLSPSQASSAASSASSSPGSGISEALRAGAGSGTGYNKEFLLYLAGFVDGDGSICASIRPCQVAKFKHALELRFTVGQRTCRRWFLDKLADEIGVGYVYDLKTCCQYNLSKIKPLHNFLTQLQPFLKLKQKQANLVLKIIEQLPSAKESPDKFLEVCTWVDQIAALNDSNTRKTTSETVRAVLDSLSEKKKSSP

SEQ ID NO: 217 - protein, 354 aa, Artificial Sequence
  Synthesized
MNTKYNKEFLLYLAGFVDADGSIYATIAPKQQLKFKHQLQLVFVVAQTTRRRWFLDKLVDEIGVGYVHDYGRASYYRLSQIKPLHNFLTQLQPFLKLKQKQANLVLKIIEQLPSAKESPDKFLEVCTWVDQIAALNDSRTRKTTSETVRAVLDSLPGSVGGLSPSQASSAASSASSSPGSGISEALRAGAGSGTGYNKEFLLYLAGFVDGDGSICASIRPCQVAKFKHALELRFTVGQTTNRRWFLDKLVDEIGVGYVYDLGGCCQYNLSQIKPLHNFLTQLQPFLKLKQKQANLVLKIIEQLPSAKESPDKFLEVCTWVDQIAALNDSRTRKTTSETVRAVLDSLSEKKKSSP

SEQ ID NO: 218 - protein, 354 aa, Artificial Sequence
  Synthesized
MNTKYNKEFLLYLAGFVDADGSIYATIAPKQQLKFKHQLQLVFVVAQKTKRRWFLDKLVDEIGVGYVHDYGRASYYRLSEIKPLHNFLTQLQPFLKLKQKQANLVLKIIEQLPSAKESPDKFLEVCTWVDQIAALNDSRTRKTTSETVRAVLDSLPGSVGGLSPSQASSAASSASSSPGSGISEALRAGAGSGTGYNKEFLLYLAGFVDGDGSICASIRPCQVAKFKHALELRFTVGQATRRRWFLDKLVDEIGVGYVYDLRNCCQYNLSQIKPLHNFLTQLQPFLKLKQKQANLVLKIIEQLPSAKESPDKFLEVCTWVDQIAALNDSRTRKTTSETVRAVLDSLSEKKKSSP

SEQ ID NO: 219 - protein, 180 aa, Artificial Sequence
  Synthesized
MNTKYNKEFLLYLAGFVDADGSIYATIAPKQQLKFKHQLQLVFVVAQKTVRRWFLDKLVDEIGVGYVHDYGAASYYRLSQIKPLHNFLTQLQPFLKLKQKQANLVLKIIEQLPSAKESPDKFLEVCTWVDQIAALNDSRTRKTTSETVRAVLDSLPGSVGGLSPSQASSAASSASSSPGS

SEQ ID NO: 220 - DNA, 22 bp, Artificial Sequence
  Synthesized
gtatagcatatgatatacgaag

SEQ ID NO: 221 - DNA, 22 bp, Artificial Sequence
  Synthesized
catatcgtatactatatgcttc

SEQ ID NO: 222 - protein, 354 aa, Artificial Sequence
  Synthesized
MNTKYNKEFLLYLAGFVDADGSIYATIAPKQQLKFKHQLQLVFVVAQATRRRWFLDKLVDEIGVGYVHDYGTASYYRLSQIKPLHNFLTQLRPFLKLKQKQANLVLKIIEQLPSAKESPDKFLEVCTWVDQIAALNDSKTRKTTSETVRAVLDSLPGSVGGLSPSQASSAASSASSSPGSGISEALRAGAGSGTGYNKEFLLYLAGFVDGDGSICASIRPCQVAKFKHALELRFTVGQKTSRRWFLDKLVDEIGVGYVYDLGRISQYNLSEIKPLHNFLTQLQPFLKLKQKQANLVLKIIEQLPSAKESPDKFLEVCTWVDQIAALNDSKTRKTTSETVRAVLDSLSEKKKSSP

SEQ ID NO: 223 - protein, 354 aa, Artificial Sequence
  Synthesized
MNTKYNKEFLLYLAGFVDADGSIYATIAPKQQLKFKHQLQLVFVVAQKTTRRWFLDKLVDEIGVGYVHDYGRASYYRLSQIKPLHNFLTQLQPFLKLKQKQANLVLKIIEQLPSAKESPDKFLEVCTWVDQIAALNDSKTRKTTSETVRAVLDSLPGSVGGLSPSQASSAASSASSSPGSGISEALRAGAGSGTGYNKEFLLYLAGFVDGDGSICASIRPCQVAKFKHALELRFTVGQRTIRRWFLDKLADEIGVGYVYDLGHIAQYNLSQIKPLHNFLTQLQPFLKLKQKQANLVLKIIEQLPSAKESPDKFLEVCTWVDQIAALNDSKTRKTTSETVRAVLDSLSEKKKSSP

SEQ ID NO: 224 - protein, 354 aa, Artificial Sequence
  Synthesized
MNTKYNKEFLLYLAGFVDGDGSIYATIAPKQQLKFKHQLQLVFVVAQKTRRRWFLDKLVDEIGVGYVHDYGSASYYRLSEIKPLHNFLTQLQPFLKLKQKQANLVLKIIEQLPSAKESPDKFLEVCTWVDQIAALNDSKTRKTTSETVRAVLDSLPGSVGGLSPSQASSAASSASSSPGSGISEALRAGAGSGTGYNKEFLLYLAGFVDADGSICASIRPCQVAKFKHALELRFTVGQKTSRRWFLDKLVDEIGVGYVYDLGRISQYNLSEIKPLHNFLTQLQPFLKLKQKQANLVLKIIEQLPSAKESPDKFLEVCTWVDQIAALNDSKTRKTTSETVRAVLDSLSEKKKSSP

SEQ ID NO: 225 - protein, 354 aa, Artificial Sequence
  Synthesized
MNTKYNKEFLLYLAGFVDSDGSIYATIAPKQQLKFKHQLQLVFVVAQKTERRWFLDKLVDEIGVGYVHDYGRASYYRLSQIKPLHNFLTQLQPFLKLKQKQANLVLKIIEQLPSAKESPDKFLEVCTWVDQIAALNDSKTRKTTSETVRAVLDSLPGSVGGLSPSQASSAASSASSSPGSGISEALRAGAGSGTGYNKEFLLYLAGFVDGDGSICASIRPCQVAKFKHALELRFTVGQATRRRWFLDKLVDEIGVGYVYDLGRISQYNLSQIKPLHNFLTQLQPFLKLKQKQANLVLKIIEQLPSAKESPDKFLEVCTWVDQIAALNDSRTRKTTSETVRAVLDSLSEKKKSSP

SEQ ID NO: 226 - protein, 354 aa, Artificial Sequence
  Synthesized
MNTKYNKEFLLYLAGFVDGDGSIYATIAPKQQLKFKHQLQLVFVVAQKTSRRWFLDKLVDEIGVGYVHDYGRASYYRLSEIKPLHNFLTQLQPFLKLKQKQANLVLKIIEQLPSAKESPDKFLEVCTWVDQIAALNDSKTRKTTSETVRAVLDSLPGSVGGLSPSQASSAASSASSSPGSGISEALRAGAGSGTGYNKEFLLYLAGFVDSDGSICASIRPCQVAKFKHALELRFTVGQKTRRRWFLDKLVDEIGVGYVYDLGRIAQYNLSQIKPLHNFLTQLQPFLKLKQKQANLVLKIIEQLPSAKESPDKFLEVCTWVDQIAALNDSKTRKTTSETVRAVLDSLSEKKKSSP

SEQ ID NO: 227 - protein, 354 aa, Artificial Sequence
  Synthesized
MNTKYNKEFLLYLAGFVDADGSIYATIAPKQQLKFKHQLQLVFVVAQKTCRRWFLDKLVDEIGVGYVHDYGRASYYRLSQIKPLHNFLTQLQPFLKLKQKQANLVLKIIEQLPSAKESPDKFLEVCTWVDQIAALNDSKTRKTTSETVRAVLDSLPGSVGGLSPSQASSAASSASSSPGSGISEALRAGAGSGTGYNKEFLLYLAGFVDGDGSICASIRPCQVAKFKHALELRFTVGQKTIRRWFLDKLVDEIGVGYVYDLGRISQYNLSEIKPLHNFLTQLQPFLKLKQKQANLVLKIIEQLPSAKESPDKFLEVCTWVDQIAALNDSRTRKTTSETVRAVLDSLSEKKKSSP

SEQ ID NO: 228 - protein, 354 aa, Artificial Sequence
  Synthesized
MNTKYNKEFLLYLAGFVDADGSIYATIAPKQQLKFKHQLQLVFVVAQKTTRRWFLDKLVDEIGVGYVHDYGRASYYRLSEIKPLHNFLTQLQPFLKLKQKQANLVLKIIEQLPSAKESPDKFLEVCTWVDQIAALNDSKTRKTTSETVRAVLDSLPGSVGGLSPSQASSAASSASSSPGSGISEALRAGAGSGTGYNKEFLLYLAGFVDGDGSICASIRPCQVAKFKHALELRFTVGQKTCRRWFLDKLVDEIGVGYVYDLGRVAQYNLSEIKPLHNFLTQLQPFLKLKQKQANLVLKIIEQLPSAKESPDKFLEVCTWVDQIAALNDSRTRKTTSETVRAVLDSLSEKKKSSP

SEQ ID NO: 229 - protein, 354 aa, Artificial Sequence
  Synthesized
MNTKYNKEFLLYLAGFVDADGSIYATIAPKQQLKFKHQLQLVFVVAQHTRRRWFLDKLVDEIGVGYVHDYGAASYYRLSEIKPLHNFLTQLQPFLKLKQKQANLVLKIIEQLPSAKESPDKFLEVCTWVDQIAALNDSRTRKTTSETVRAVLDSLPGSVGGLSPSQASSAASSASSSPGSGISEALRAGAGSGTGYNKEFLLYLAGFVDGDGSICASIRPCQVAKFKHALELRFTVGQKTSRRWFLDKLADEIGVGYVYDLGHISQYNLSEIKPLHNFLTQLQPFLKLKQKQANLVLKIIEQLPSAKESPDKFLEVCTWVDQIAALNDSKTRKTTSETVRAVLDSLSEKKKSSP

SEQ ID NO: 230 - protein, 354 aa, Artificial Sequence
  Synthesized
MNTKYNKEFLLYLAGFVDADGSIYATIAPKQQLKFKHQLQLVFVVAQKTTRRWFLDKLVDEIGVGYVHDYGTASYYRLSEIKPLHNFLTQLQPFLKLKQKQANLVLKIIEQLPSAKESPDKFLEVCTWVDQIAALNDSRTRKTTSETVRAVLDSLPGSVGGLSPSQASSAASSASSSPGSGISEALRAGAGSGTGYNKEFLLYLAGFVDGDGSICASIRPCQVAKFKHALELRFTVGQKTIRRWFLDKLVDEIGVGYVYDLGRIAQYNLSQIKPLHNFLTQLQPFLKLKQKQANLVLKIIEQLPSAKESPDKFLEVCTWVDQIAALNDSRTRKTTSETVRAVLDSLSEKKKSSP

SEQ ID NO: 231 - protein, 354 aa, Artificial Sequence
  Synthesized
MNTKYNKEFLLYLAGFVDGDGSIYATIAPKQQLKFKHQLQLVFVVAQLTRRRWFLDKLVDEIGVGYVHDYGRASYYRLSEIKPLHNFLTQLQPFLKLKQKQANLVLKIIEQLPSAKESPDKFLEVCTWVDQIAALNDSKTRKTTSETVRAVLDSLPGSVGGLSPSQASSAASSASSSPGSGISEALRAGAGSGTGYNKEFLLYLAGFVDADGSICASIRPCQVAKFKHALELRFTVGQKTARRWFLDKLVDEIGVGYVYDLGRVSQYNLSQIKPLHNFLTQLQPFLKLKQKQANLVLKIIEQLPSAKESPDKFLEVCTWVDQIAALNDSRTRKTTSETVRAVLDSLSEKKKSSP

SEQ ID NO: 232 - protein, 354 aa, Artificial Sequence
  Synthesized
MNTKYNKEFLLYLAGFVDGDGSIYATIAPKQQLKFKHQLQLVFVVAQKTRRRWFLDKLVDEIGVGYVHDYGRASYYRLSQIKPLHNFLTQLQPFLKLKQKQANLVLKIIEQLPSAKESPDKFLEVCTWVDQIAALNDSKTRKTTSETVRAVLDSLPGSVGGLSPSQASSAASSASSSPGSGISEALRAGAGSGTGYNKEFLLYLAGFVDADGSICASIRPCQVAKFKHALELRFTVGQKTSRRWFLDKLVDEIGVGYVYDLGHVSQYNLSEIKPLHNFLTQLQPFLKLKQKQANLVLKIIEQLPSAKESPDKFLEVCTWVDQIAALNDSRTRKTTSETVRAVLDSLSEKKKSSP

SEQ ID NO: 233 - protein, 354 aa, Artificial Sequence
  Synthesized
MNTKYNKEFLLYLAGFVDADGSIYATIAPKQQLKFKHQLQLVFVVAQLTRRRWFLDKLVDEIGVGYVHDYGRASYYRLSQIKPLHNFLTQLQPFLKLKQKQANLVLKIIEQLPSAKESPDKFLEVCTWVDQIAALNDSKTRKTTSETVRAVLDSLPGSVGGLSPSQASSAASSASSSPGSGISEALRAGAGSGTGYNKEFLLYLAGFVDGDGSICASIRPCQVAKFKHALELRFTVGQATRRRWFLDKLVDEIGVGYVYDLGRVAQYNLSEIKPLHNFLTQLQPFLKLKQKQANLVLKIIEQLPSAKESPDKFLEVCTWVDQIAALNDSKTRKTTSETVRAVLDSLSEKKKSSP

SEQ ID NO: 234 - protein, 354 aa, Artificial Sequence
  Synthesized
MNTKYNKEFLLYLAGFVDADGSIYATIAPKQQLKFKHQLQLVFVVAQKTRRRWFLDKLVDEIGVGYVHDYGRASYYRLSQIKPLHNFLTQLQPFLKLKQKQANLVLKIIEQLPSAKESPDKFLEVCTWVDQIAALNDSKTRKTTSETVRAVLDSLPGSVGGLSPSQASSAASSASSSPGSGISEALRAGAGSGTGYNKEFLLYLAGFVDGDGSICASIRPCQVAKFKHALELRFTVGQKTCRRWFLDKLVDEIGVGYVYDLGHISQYNLSEIKPLHNFLTQLQPFLKLKQKQANLVLKIIEQLPSAKESPDKFLEVCTWVDQIAALNDSKTRKTTSETVRAVLDSLSEKKKSSP

SEQ ID NO: 235 - protein, 354 aa, Artificial Sequence
  Synthesized
MNTKYNKEFLLYLAGFVDGDGSIYATIAPKQQLKFKHQLQLVFVVAQATRRRWFLDKLVDEIGVGYVHDYGRASYYRLSEIKPLHNFLTQLQPFLKLKQKQANLVLKIIEQLPSAKESPDKFLEVCTWVDQIAALNDSRTRKTTSETVRAVLDSLPGSVGGLSPSQASSAASSASSSPGSGISEALRAGAGSGTGYNKEFLLYLAGFVDADGSICASIRPCQVAKFKHALELRFTVGQKTCRRWFLDKLVDEIGVGYVYDLGRVSQYNLSQIKPLHNFLTQLQPFLKLKQKQANLVLKIIEQLPSAKESPDKFLEVCTWVDQIAALNDSKTRKTTSETVRAVLDSLSEKKKSSP

SEQ ID NO: 236 - protein, 354 aa, Artificial Sequence
  Synthesized
MNTKYNKEFLLYLAGFVDADGSIYATIAPKQQLKFKHQLQLVFVVAQKTTRRWFLDKLVDEIGVGYVHDYGTASYYRLSEIKPLHNFLTQLQPFLKLKQKQANLVLKIIEQLPSAKESPDKFLEVCTWVDQIAALNDSRTRKTTSETVRAVLDSLPGSVGGLSPSQASSAASSASSSPGSGISEALRAGAGSGTGYNKEFLLYLAGFVDGDGSICASIRPCQVAKFKHALELRFTVGQKTSRRWFLDKLVDEIGVGYVYDLGRISQYNLSEIKPLHNFLTQLQPFLKLKQKQANLVLKIIEQLPSAKESPDKFLEVCTWVDQIAALNDSRTRKTTSETVRAVLDSLSEKKKSSP

SEQ ID NO: 237 - protein, 354 aa, Artificial Sequence
  Synthesized
MNTKYNKEFLLYLAGFVDADGSIYATIAPKQQLKFKHQLQLVFVVAQKTVRRWFLDKLVDEIGVGYVHDYGRASYYRLSEIKPLHNFLTQLQPFLKLKQKQANLVLKIIEQLPSAKESPDKFLEVCTWVDQIAALNDSKTRKTTSETVRAVLDSLPGSVGGLSPSQASSAASSASSSPGSGISEALRAGAGSGTGYNKEFLLYLAGFVDGDGSICASIRPCQVAKFKHALELRFTVGQKTQRRWFLDKLVDEIGVGYVYDLGHIAQYNLSQIKPLHNFLTQLQPFLKLKQKQANLVLKIIEQLPSAKESPDKFLEVCTWVDQIAALNDSRTRKTTSETVRAVLDSLSEKKKSSP

SEQ ID NO: 238 - protein, 354 aa, Artificial Sequence
  Synthesized
MNTKYNKEFLLYLAGFVDADGSIYATIAPKQQLKFKHQLQLVFVVAQKTRRRWFLDKLVDEIGVGYVHDYGRASYYRLSQIKPLHNFLTQLQPFLKLKQKQANLVLKIIEQLPSAKESPDKFLEVCTWVDQIAALNDSKTRKTTSETVRAVLDSLPGSVGGLSPSQASSAASSASSSPGSGISEALRAGAGSGTGYNKEFLLYLAGFVDGDGSICASIRPCQVAKFKHALELRFTVGQKTCRRWFLDKLVDEIGVGYVYDLGRITQYNLSQIKPLHNFLTQLQPFLKLKQKQANLVLKIIEQLPSAKESPDKFLEVCTWVDQIAALNDSRTRKTTSETVRAVLDSLSEKKKSSP

SEQ ID NO: 239 - protein, 354 aa, Artificial Sequence
  Synthesized
MNTKYNKEFLLYLAGFVDADGSIYATIAPKQQLKFKHQLQLVFVVAQKTRRRWFLDKLVDEIGVGYVHDYGSSSYYRLSQIKPLHNFLTQLQPFLKLKQKQANLVLKIIEQLPSAKESPDKFLEVCTWVDQIAALNDSRTRKTTSETVRAVLDSLPGSVGGLSPSQASSAASSASSSPGSGISEALRAGAGSGTGYNKEFLLYLAGFVDGDGSICASIRPCQVAKFKHALELRFTVGQSTRRRWFLDKLVDEIGVGYVYDLGHVSQYNLSQIKPLHNFLTQLQPFLKLKQKQANLVLKIIEQLPSAKESPDKFLEVCTWVDQIAALNDSKTRKTTSETVRAVLDSLSEKKKSSP

SEQ ID NO: 240 - protein, 354 aa, Artificial Sequence
  Synthesized
MNTKYNKEFLLYLAGFVDADGSIYATIAPKQQLKFKHQLQLVFVVAQKTTRRWFLDKLVDEIGVGYVHDYGSASYYRLSEIKPLHNFLTQLQPFLKLKQKQANLVLKIIEQLPSAKESPDKFLEVCTWVDQIAALNDSKTRKTTSETVRAVLDSLPGSVGGLSPSQASSAASSASSSPGSGISEALRAGAGSGTGYNKEFLLYLAGFVDGDGSICASIRPCQVAKFKHALELRFTVGQATRRRWFLDKLVDEIGVGYVYDLGRVAQYNLSEIKPLHNFLTQLQPFLKLKQKQANLVLKIIEQLPSAKESPDKFLEVCTWVDQIAALNDSKTRKTTSETVRAVLDSLSEKKKSSP

SEQ ID NO: 241 - protein, 354 aa, Artificial Sequence
  Synthesized
MNTKYNKEFLLYLAGFVDADGSIYATIAPKQQLKFKHQLQLVFVVAQLTRRRWFLDKLVDEIGVGYVHDYGRASYYRLSQIKPLHNLLTQLQPFLKLKQKQANLVLKIIEQLPSAKESPDKFLEVCTWVDQIAALNDSKTRKTTSETVRAVLDSLPGSVGGLSPSQASSAASSASSSPGSGISEALRAGAGSGTGYNKEFLLYLAGFVDGDGSICASIRPCQVAKFKHALELRFTVGQKTSRRWFLDKLVDEIGVGYVYDLGRVAQYNLSEIKPLHNFLTQLQPFLKLKQKQANLVLKIIEQLPSAKESPDKFLEVCTWVDQIAALNDSKTRKTTSETVRAVLDSLSEKKKSSP

SEQ ID NO: 242 - protein, 354 aa, Artificial Sequence
  Synthesized
MNTKYNKEFLLYLAGFVDADGSIYATIAPKQQLKFKHQLQLVFVVAQKTSRRWFLDKLVDEIGVGYVHDYGRASYYRLSQIKPLHNFLTQLQPFLKLKQKQANLVLKIIEQLPSAKESPDKFLEVCTWVDQIAALNDSKTRKTTSETVRAVLDSLPGSVGGLSPSQASSAASSASSSPGSGISEALRAGAGSGTGYNKEFLLYLAGFVDGDGSICASIRPCQVAKFKHALELRFTVGQHTCRRWFLDKLVDEIGVGYVYDLGRVSQYNLSQIKPLHNFLTQLQPFLKLKQKQANLVLKIIEQLPSAKESPDKFLEVCTWVDQIAALNDSRTRKTTSETVRAVLDSLSEKKKSSP

SEQ ID NO: 243 - protein, 354 aa, Artificial Sequence
  Synthesized
MNTKYNKEFLLYLAGFVDADGSIYATIAPKQQLKFKHQLQLVFVVAQKTTRRWFLDKLVDEIGVGYVHDYGKASYYRLSEIKPLHNFLTQLQPFLKLKQKQANLVLKIIEQLPSAKESPDKFLEVCTWVDQIAALNDSRTRKTTSETVRAVLDSLPGSVGGLSPSQASSAASSASSSPGPGISEALRAGAGSGTGYNKEFLLYLAGFVDGDGSICASIRPCQVAKFKHALELRFTVGQKTIRRWFLDKLADEIGVGYVYDLGRISQYNLSEIKPLHNFLTQLQPFLKLKQKQANLVLKIIEQLPSAKESPDKFLEVCTWVDQIAALNDSRTRKTTSETVRAVLDSLSEKKKSSP

SEQ ID NO: 244 - DNA, 22 bp, Artificial Sequence
  Synthesized
gtatagcatatggtatacgaag

SEQ ID NO: 245 - DNA, 22 bp, Artificial Sequence
  Synthesized
catatcgtataccatatgcttc

SEQ ID NO: 246 - protein, 355 aa, Artificial Sequence
  Synthesized
MNTKYNKEFLLYLAGFVDGDGSIYATIAPKQQLKFKHQLQLVFVVAQKTRRRWFLDKLVDEIGVGYVHDYGPASYYRLSEIEPLHNFLTQLQPFLKLKQKQANLVLKIIEQLPSAKESPDKFLEVCTWVDQIAALNDSRTRKTTSETVRAVLDSLPGSVGGLSPSQASSAASSASSSPGSGISEALRAGAGSGTGYNKEFLLYLAGFVDADGSICASIRPCQVAKFKHALELRFTVGQKTRRRWFLDKLVDEIGVGYVYDLDGRRSQYNLSQIKPLHNFLTQLQPFLKLKQKQANLVLKIIEQLPSAKESPDKFLEVCTWVDQIAALNDSKTRKTTSETVRAVLDSLSEKKKSSP

SEQ ID NO: 247 - protein, 354 aa, Artificial Sequence
  Synthesized
MNTKYNKEFLLYLAGFVDADGSIYATIAPKQQLKFKHQLQLVFVVAQKTRRRWFLDKLVDEIGVGYVHDYSGCCYYRLSQIKPLHNFLTQLQPFLKLKQKQANLVLKIIEQLPSAKESPDKFLEVCTWVDQIAALNDSKTRKTTSETVRAVLDSLPGSVGGLSPSQASSAASSASSSPGSGISEALRAGAGSGTGYNKEFLLYLAGFVDGDGSICASIRPCQVAKFKHALELRFTVGQKTRRRWFLDKLVDEIGVGYVYDLGGRSQYNLSRIKPLHNFLTQLQPFLKLKQKQANLVLKIIEQLPSAKESPDKFLEVCTWVDQIAALNDSKTRKTTSETVRAVLDSLSEKKKSSP

SEQ ID NO: 248 - DNA, 22 bp, Artificial Sequence
  Synthesized
gtatagcatttggtatacgaag

SEQ ID NO: 249 - DNA, 22 bp, Artificial Sequence
  Synthesized
catatcgtaaaccatatgcttc

SEQ ID NO: 250 - protein, 354 aa, Artificial Sequence
  Synthesized
MNTKYNKEFLLYLAGFVDGDGSIYATIAPKQQLKFKHQLQLVFVVAQKTRRRWFLDKLVDEIGVGYVHDYSGRSYYRLSQIKPLHNFLTQLQPFLKLKQKQANLVLKIIEQLPSAKESPDKFLEVCTWVDQIAALNDSKTRKTTSETVRAVLDSLPGSVGGLSPSQASSAASSASSSPGSGISEALRAGAGSGTGYNKEFLLYLAGFVDADGSICASIRPCQVAKFKHALELRFTVGQKTCRRWFLDKLVDEIGVGYVYDLGQISQYNLSQIKPLHNFLTQLQPFLKLKQKQANLVLKIIEQLPSAKESPDKFLEVCTWVDQIAALNDSRTRKTTSETVRAVLDSLSEKKKSSP

SEQ ID NO: 251 - protein, 354 aa, Artificial Sequence
  Synthesized
MNTKYNKEFLLYLAGFVDGDGSIYATIAPKQQLKFKHQLQLVFVVAQKTRRRWFLDKLVDEIGVGYVHDYSGRSYYRLSQIKPLHNFLTQLQPFLKLKQKQANLVLKIIEQLPSAKESPDKFLEVCTWVDQIAALNDSKTRKTTSETVRAVLDSLPGSVGGLSPSQASSAASSASSSPGSGISEALRAGAGSGTGYNKEFLLYLAGFVDADGSICASIRPCQVAKFKHALELRFTVGQKTCRRWFLDKLVDEIGVGHVYDLKKISQYNLSQIKPLHNFLTQLQPFLKLKQKQANLVLKIIEQLPSAKESPDKFLEVCTWVDQIAALNDSKTRKTTSETVRAVLDSLSEKKKSSP

SEQ ID NO: 252 - protein, 354 aa, Artificial Sequence
  Synthesized
MNTKYNKEFLLYLAGFVDGDGSIYATIAPKQQLKFKHQLQLVFVVAQKTRRRWFLDKLVDEIGVGYVHDYSGRSYYRLSQIKPLHNFLTQLQPFLKLKQKQANLVLKIIEQLPSAKESPDKFLEVCTWVDQIAALNDSKTRKTTSETVRAVLDSLPGSVGGLSPSQASSAASSASSSPGSGISEALRAGAGSGTGYNKEFLLYLAGFVDADGSICASIRPCQVAKFKHALELRFTVGQKTTRRWFLDKLVDEIGVGYVYDLGTIAQYNLSQIKPLHNFLTQLQPFLKLKQKQANLVLKIIEQLPSAKESPDKFLEVCTWVDQIAALNDSRTRKTTSETVRAVLDSLSEKKKSSP

SEQ ID NO: 253 - protein, 354 aa, Artificial Sequence
  Synthesized
MNTKYNKEFLLYLAGFVDGDGSIYATIAPKQQLKFKHQLQLVFVVAQKTRRRWFLDKLVDEIGVGYVHDYSGRSYYRLSQIKPLHNFLTQLQPFLKLKQKQANLVLKIIEQLPSAKESPDKFLEVCTWVDQIAALNDSKTRKTTSETVRAVLDSLPGSVGGLSPSQASSAASSASSSPGSGISEALRAGAGSGTGYNKEFLLYLAGFVDADGSICASIRPCQVAKFKHALELRFTVGQKTERRWFLDKLVDEIGVGYVYDLGRISQYNLSQIKPLHNFLTQLQPFLKLKQKQANLVLKIIEQLPSAKESPDKFLEVCTWVDQIAALNDSRTRKTTSETVRAVLDSLSEKKKSSP

SEQ ID NO: 254 - protein, 354 aa, Artificial Sequence
  Synthesized
MNTKYNKEFLLYLAGFVDGDGSIYATIAPKQQLKFKHQLQLVFVVAQKTRRRWFLDKLVDEIGVGYVHDYSGRSYYRLSQIKPLHNFLTQLQPFLKLKQKQANLVLKIIEQLPSAKESPDKFLEVCTWVDQIAALNDSKTRKTTSETVRAVLDSLPGSVGGLSPSQASSAASSASSSPGSGISEALRAGAGSGTGYNKEFLLYLAGFVDADGSICASIRPCQVAKFKHALELRFTVGQKTCRRWFLDKLVDEIGVGYVYDLGHIAQYNLSQIKPLHNFLTQLQPFLKLKQKQANLVLKIIEQLPSAKESPDKFLEVCTWVDQIAALNDSRTRKTTSETVRAVLDSLSEKKKSSP

SEQ ID NO: 255 - protein, 354 aa, Artificial Sequence
  Synthesized
MNTKYNKEFLLYLAGFVDGDGSIYATIAPKQQLKFKHQLQLVFVVAQKTRRRWFLDKLVDEIGVGYVHDYSGRSYYRLSQIKPLHNFLTQLQPFLKLKQKQANLVLKIIEQLPSAKESPDKFLEVCTWVDQIAALNDSKTRKTTSETVRAVLDSLPGSVGGLSPSQASSAASSASSSPGSGISEALRAGAGSGTGYNKEFLLYLAGFVDADGSICASIRPCQVAKFKHALELRFTVGQSTKRRWFLDKLVDEIGVGYVYDLGAIAQYNLSQIKPLHNFLTQLQPFLKLKQKQANLVLKIIEQLPSAKESPDKFLEVCTWVDQIAALNDSRTRKTTSETVRAVLDSLSEKKKSSP

SEQ ID NO: 256 - protein, 354 aa, Artificial Sequence
  Synthesized
MNTKYNKEFLLYLAGFVDGDGSIYATIAPKQQLKFKHQLQLVFVVAQKTRRRWFLDKLVDEIGVGYVHDYSGRSYYRLSQIKPLHNFLTQLQPFLKLKQKQANLVLKIIEQLPSAKESPDKFLEVCTWVDQIAALNDSKTRKTTSETVRAVLDSLPGSVGGLSPSQASSAASSASSSPGSGISEALRAGAGSGTGYNKEFLLYLAGFVDADGSICASIRPCQVAKFKHALELRFTVGQSTRRRWFLDKLVDEIGVGYVYDLGSVSQYNLSQIKPLHNFLTQLQPFLKLKQKQANLVLKIIEQLPSAKESPDKFLEVCTWVDQIAALNDSRTRKTTSETVRAVLDSLSEKKKSSP

SEQ ID NO: 257 - protein, 354 aa, Artificial Sequence
  Synthesized
MNTKYNKEFLLYLAGFVDGDGSIYATIAPKQQLKFKHQLQLVFVVAQKTRRRWFLDKLVDEIGVGYVHDYSGRSYYRLSQIKPLHNFLTQLQPFLKLKQKQANLVLKIIEQLPSAKESPDKFLEVCTWVDQIAALNDSKTRKTTSETVRAVLDSLPGSVGGLSPSQASSAASSASSSPGSGISEALRAGAGSGTGYNKEFLLYLAGFVDADGSICASIRPCQVAKFKHALELRFTVGQSTKRRWFLDKLVDEIGVGYVYDLGTISQYNLSQIKPLHNFLTQLQPFLKLKQKQANLVLKIIEQLPSAKESPDKFLEVCTWVDQIAALNDSRTRKTTSETVRAVLDSLSEKKKSSP

SEQ ID NO: 258 - protein, 354 aa, Artificial Sequence
  Synthesized
MNTKYNKEFLLYLAGFVDGDGSIYATIAPKQQLKFKHQLQLVFVVAQKTRRRWFLDKLVDEIGVGYVHDYSGRSYYRLSQIKPLHNFLTQLQPFLKLKQKQANLVLKIIEQLPSAKESPDKFLEVCTWVDQIAALNDSKTRKTTSETVRAVLDSLPGSVGGLSPSQASSAASSASSSPGSGISEALRAGAGSGTGYNKEFLLYLAGFVDADGSICASIRPCQVAKFKHALELRFTVGQKTCRRWFLDKLVDEIGVGYVYDLGRISQYNLSQIKPLHNFLTQLQPFLKLKQKQANLVLKIIEQLPSAKESPDKFLEVCTWVDQIAALNDSRTRKTTSETVRAVLDSLSEKKKSSP

SEQ ID NO: 259 - protein, 354 aa, Artificial Sequence
  Synthesized
MNTKYNKEFLLYLAGFVDADGSIYATIAPKQQLKFKHQLQLVFVVAQKTRRRWFLDKLVDEIGVGYVHDYSGRSYYRLSQIKPLHNFLTQLQPFLKLKQKQANLVLKIIEQLPSAKESPDKFLEVCTWVDQIAALNDSKTRKTTSETVRAVLDSLPGSVGGLSPSQASSAASSASSSPGSGISEALRAGAGSGTGYNKEFLLYLAGFVDGDGSICASIRPCQVAKFKHALELRFTVGQKTERRWFLDKLVDEIGVGYVYDLGKIAQYNLSQIKPLHNFLTQLQPFLKLKQKQANLVLKIIEQLPSAKESPDKFLEVCTWVDQIAALNDSRTRKTTSETVRAVLDSLSEKKKSSP

SEQ ID NO: 260 - protein, 354 aa, Artificial Sequence
  Synthesized
MNTKYNKEFLLYLAGFVDGDGSIYATIAPKQQLKFKHQLQLVFVVAQKTRRRWFLDKLVDEIGVGYVHDYSGRSYYRLSQIKPLHNFLTQLQPFLKLKQKQANLVLKIIEQLPSAKESPDKFLEVCTWVDQIAALNDSKTRKTTSETVRAVLDSLPGSVEGLSPSQASSAASSASSSPGSGISEALRAGAGSGTGYNKEFLLYLAGFVDADGSICASIRPCQVAKFKHALELRFTVGQSTKRRWFLDKLVDEIGVGYVYDLGKISQYNLSQIKPLHNFLTQLQPFLKLKQKQANLVLKIIEQLPSAKESPDKFLEVCTWVDQIAALNDSRTRKTTSETVRAVLDSLSEKKKSSP

SEQ ID NO: 261 - protein, 354 aa, Artificial Sequence
  Synthesized
MNTKYNKEFLLYLAGFVDADGSIYATIAPKQQLKFKHQLQLVFVVAQKTRRRWFLDKLVDEIGVGYVHDYSGRSYYRLSQIKPLHNFLTQLQPFLKLKQKQANLVLKIIEQLPSAKESPDKFLEVCTWVDQIAALNDSKTRKTTSETVRAVLDSLPGSVGGLSPSQASSAASSASSSPGSGISEALRAGAGSGTGYNKEFLLYLAGFVDGDGSICASIRPCQVAKFKHALELRFTVGQSTKRRWFLDKLVDEIGVGYVYDLGKISQYNLSQIKPLHNFLTQLQPFLKLKQKQANLVLKIIEQLPSAKESPDKFLEVCTWVDQIAALNDSRTRKTTSETVRAVLDSLSEKKKSSP

SEQ ID NO: 262 - protein, 354 aa, Artificial Sequence
  Synthesized
MNTKYNKEFLLYLAGFVDADGSIYATIAPKQQLKFKHQLQLVFVVAQKTRRRWFLDKLVDEIGVGYVHDYSGRSYYRLSQIKPLHNFLTQLQPFLKLKQKQANLVLKIIEQLPSAKESPDKFLEVCTWVDQIAALNDSKTRKTTSETVRAVLDSLPGSVGGLSPSQASSAASSASSSPGSGISEALRAGAGSGTGYNKEFLLYLAGFVDGDGSICASIRPCQVAKFKHALELRFTVGQSTKRRWFLDKLVDEIGVGYVYDLGSVSQYNLSQIKPLHNFLTQLQPFLKLKQKQANLVLKIIEQLPSAKESPDKFLEVCTWVDQIAALNDSRTRKTTSETVRAVLDSLSEKKKSSP

SEQ ID NO: 263 - protein, 354 aa, Artificial Sequence
  Synthesized
MNTKYNKEFLLYLAGFVDGDGSIYATIAPKQQLKFKHQLQLVFVVAQKTRRRWFLDKLVDEIGVGYVHDYSGRSYYRLSQIKPLHNFLTQLQPFLKLKQKQANLVLKIIEQLPSAKESPDKFLEVCTWVDQIAALNDSKTRKTTSETVRAVLDSLPGSVGGLSPSQASSAASSASSSPGSGISEALRAGAGSGTGYNKEFLLYLAGFVDADGSICASIRPCQVAKFKHALELRFTVGQKTTRRWFLDKLVDEIGVGYVYDLGAISQYNLSQIKPLHNFLTQLQPFLKLKQKQANLVLKIIEQLPSAKESPDKFLEVCTWVDQIAALNDSRTRKTTSETVRAVLDSLSEKKKSSP

SEQ ID NO: 264 - protein, 354 aa, Artificial Sequence
  Synthesized
MNTKYNKEFLLYLAGFVDGDGSIYATIAPKQQLKFKHQLQLVFVVAQKTRRRWFLDKLVDEIGVGYVHDYSGRSYYRLSQIKPLHNFLTQLQPFLKLKQKQANLVLKIIEQLPSAKESPDKFLEVCTWVDQIAALNDSKTRKTTSETVRAVLDSLPGSVGGLSPSQASSAASSASSSPGSGISEALRAGAGSGTGYNKEFLLYLAGFVDADGSICASIRPCQVAKFKHALELRFTVGQSTRRRWFLDKLVDEIGVGYVYDLGRISQYNLSQIKPLRNFLTQLQPFLKLKQKQANLVLKIIEQLPSAKESPDKFLEVCTWVDQIAALNDSRTRKTTSETVRAVLDSLSEKKKSSP

SEQ ID NO: 265 - protein, 354 aa, Artificial Sequence
  Synthesized
MNTKYNKEFLLYLAGFVDADGSIYATIAPKQQLKFKHQLQLVFVVAQKTRRRWFLDKLVDEIGVGYVHDYSGRSYYRLSQIKPLHNFLTQLQPFLKLKQKQANLVLKIIEQLPSAKESPDKFLEVCTWVDQIAALNDSKTRKTTSETVRAVLDSLPGSVGGLSPSQASSAASSASSSPGSGISEALRAGAGSGTGYNKEFLLYLAGFVDGDGSICASIRPCQVAKFKHALELRFTVGQSTKRRWFLDKLVDEIGVGYVYDLGTISQYNLSQIKPLHNFLTQLQPFLKLKQKQANLVLKIIEQLPSAKESPDKFLEVCTWVDQIAALNDSRTRKTTSETVRAVLDSLSEKKKSSP

SEQ ID NO: 266 - protein, 354 aa, Artificial Sequence
  Synthesized
MNTKYNKEFLLYLAGFVDGDGSIYATIAPKQQLKFKHQLQLVFVVAQKTRRRWFLDKLVDEIGVGYVHDYSGRSYYRLSQIKPLHNFLTQLQPFLKLKQKQANLVLKIIEQLPSAKESPDKFLEVCTWVDQIAALNDSKTRKTTSETVRAVLDSLPGSVGGLSPSQASSATSSASSSPGSGISEALRAGAGSGTGYNKEFLLYLAGFVDADGSICASIRPCQVAKFKHALELRFTVGQSTRRRWFLDKLVDEIGVGYVYDLGAVAQYNLSQIKPLHNFLTQLQPFLKLKQKQANLVLKIIEQLPSAKESPDKFLEVCTWVDQIAALNDSRTRKTTSETVRAVLDSLSEKKKSSP

SEQ ID NO: 267 - DNA, 22 bp, Artificial Sequence
  Synthesized
gtatagcatgcaatatacgaag

SEQ ID NO: 268 - DNA, 22 bp, Artificial Sequence
  Synthesized
catatcgtacgttatatgcttc

SEQ ID NO: 269 - protein, 354 aa, Artificial Sequence
  Synthesized
MNTKYNKEFLLYLAGFVDADGSIYATIAPKQQLKFKHQLQLVFVVAQKTRRRWFLDKLVDEIGVGYVHDYGPTSYYRLSEIKPLHNFLTQLQPFLKLKQKQANLVLKIIEQLPSAKESPDKFLEVCTWVDQIAALNDSKTRKTTSETVRAVLDSLPGSVGGLSPSQASSAASSASSSPGSGISEALRAGAGSGTGYNKEFLLYLAGFVDGDGSICASIRPCQVAKFKHALELRFTVGQSTRRRWFLDKLVDEIGVGYVYDLGGCAQYNLSQIKPLHNFLTQLQPFLKLKQKQANLVLKIIEQLPSAKESPDKFLEVCTWVDQIAALNDSRTRKTTSETVRAVLDSLSEKKKSSP

SEQ ID NO: 270 - protein, 354 aa, Artificial Sequence
  Synthesized
MNTKYNKEFLLYLAGFVDADGSIYATIAPKQQLKFKHQLQLVFVVAQKTRRRWFLDKLVDEIGVGYVHDYNSTSYYRLSQIKPLHNFLTQLQPFLKLKQKQANLVLKIIEQLPSAKESPDKFLEVCTWVDQIAALNDSKTRKTTSETVRAVLDSLPGSVGGLSPSQASSAASSASSSPGSGISEALRAGAGSGTGYNKEFLLYLAGFVDGDGSICASIRPCQVAKFKHALELRFTVGQSTCRRWFLDKLVDEIGVGYVYDLGSVSQYTLSQIKPLHNFLTQLQPFLKLKQKQANLVLKIIEQLPSAKESPDKFLEVCTWVDQIAALNDSRTRKTTSETVRAVLDSLSEKKKSSP

SEQ ID NO: 271 - protein, 354 aa, Artificial Sequence
  Synthesized
MNTKYNKEFLLYLAGFVDADGSIYATIAPKQQLKFKHQLQLVFVVAQKTRRRWFLDKLVDEIGVGYVHDYTNTSYYRLSEIKPLHNFLTQLQPFLKLKQKQANLVLKIIEQLPSAKESPDKFLEVCTWVDQIAALNDSKTRKTTSETVRAVLDSLPGSVGGLSPSQASSAASSASSSPGSGISEALRAGAGSGTGYNKEFLLYLAGFVDGDGSICASIRPCPVAKFKHALELRFTVGQATRRRWFLDKLVDEIGVGYVYDLGACAQYNLSEIKPLHNFLTQLQPFLKLKQKQANLVLKIIEQLPSAKESPDKFLEVCTWVDQIAALNDSKTRKTTSETVRAVLDSLSEKKKSSP

SEQ ID NO: 272 - protein, 354 aa, Artificial Sequence
  Synthesized
MNTKYNKEFLLYLAGFVDADGSIYATIAPKQQLKFKHQLQLVFVVAQKTCRRWFLDKLVDEIGVGYVHDYRQVSYYRLSEIKPLHNFLTQLQPFLKLKQKQANLVLKIIEQLPSAKESPDKFLEVCTWVDQIAALNDSKTRKTTSETVRAVLDSLPGSVGGLSPSQASSAASSASSSPGSGISEALRAGAGSGTGYNKEFLLYLAGFVDGDGSICASIRPCQVAKFKHALELRFTVGQKTCRRWFLDKLVDEIGVGYVYDLGTCSQYNLSEIKPLHNFLTQLQPFLKLKQKQANLVLKIIEQLPSAKESPDKFLEVCTWVDQIAALNDSRTRKTTSETVRAVLDSLSEKKKSSP

SEQ ID NO: 273 - protein, 354 aa, Artificial Sequence
  Synthesized
MNTKYNKEFLLYLAGFVDGDGSIYATIAPKQQLKFKHQLQLVFVVAQKTRRRWFLDKLVDEIGVGYVHDYSGVCYYRLSQIKPLHNFLTQLQPFLKLKQKQANLVLKIIEQLPSAKESPDKFLEVCTWVDQIAALNDSKTRKTTSETVRAVLDSLPGSVGGLSPSQASSAASSASSSPGSGISEALRAGAGSGTGYNKEFLLYLAGFVDADGSICASIRPCQVAKFKHALELRFTVGQSTRRRWFLDKLVDEIGVGYVYDLGEVSQYNLSEIKPLHNFLTQLQPFLKLKQKQANLVLKIIEQLPSAKESPDKFLEVCTWVDQIAALNDSRTRKTTSETVRAVLDSLSEKKKSSP

SEQ ID NO: 274 - protein, 354 aa, Artificial Sequence
  Synthesized
MNTKYNKEFLLYLAGFVDGDGSIYATIAPKQQLKFKHQLQLVFVVAQKTKRRWFLDKLVDEIGVGYVHDYRGVSYYRLSQIKPLHNFLTQLQPFLKLKQKQANLVLKIIEQLPSAKESPDKFLEVCTWVDQIAALNDSKTRKTTSETVRAVLDSLPGSVGGLSPSQASSAASSASSSPGSGISEALRAGAGSGTGYNKEFLLYLAGFVDADGSICASIRPCQVAKFKHALELRFTVGQATRRRWFLDKLVDEIGVGYVYDLRNIAQYNLSQIKPLHNFLTQLQPFLKLKQKQANLVLKIIEQLPSAKESPDKFLEVCTWVDQIAALNDSRTRKTTSETVRAVLDSLSEKKKSSP

SEQ ID NO: 275 - protein, 354 aa, Artificial Sequence
  Synthesized
MNTKYNKEFLLYLAGFVDADGSIYATIAPKQQLKFKHQLQLVFVVAQKTRRRWFLDKLVDEIGVGYVHDYGATSYYRLSEIKPLHNFLTQLQPFLKLKQKQANLVLKIIEQLPSAKESPDKFLEVCTWVDQIAALNDSKTRKTTSETVRAVLDSLPGSVGGLSPSQASSAASSASSSPGSGISEALRAGAGSGTGYNKEFLLYLAGFVDGDGSICASIRPCQVAKFKHALELRFTVGQSTTRRWFLDKLVDEIGVGYVYDLGSVSQYNLSQIKPLHNFLTQLQPFLKLKQKQANLVLKIIEQLPSAKESPDKFLEVCTWVDQIAALNDSRTRKTTSETVRAVLDSLSEKKKSSP

SEQ ID NO: 276 - protein, 354 aa, Artificial Sequence
  Synthesized
MNTKYNKEFLLYLAGFVDSDGSIYATIAPKQQLKFKHQLQLVFVVAQKTRRRWFLDKLVDEIGVGYVHDYRNVSYYRLSEIKPLHNFLTQLQPFLKLKQKQANLVLKIIEQLPSAKESPDKFLEVCTWVDQIAALNDSKTRKTTSETVRAVLDSLPGSVGGLSPSQASSAASSASSSPGSGISEALRAGAGSGTGYNKEFLLYLAGFVDGDGSICASIRPCQVAKFKHALELRFTVGQATRRRWFLDKLVDEIGVGYVYDLGGVAQYNLSQIKPLHNFLTQLQPFLKLKQKQANLVLKIIEQLPSAKESPDKFLEVCTWVDQIAALNDSRTRKTTSETVRAVLDSLSEKKKSSP

SEQ ID NO: 277 - protein, 354 aa, Artificial Sequence
  Synthesized
MNTKYNKEFLLYLAGFVDADGSIYATIAPKQQLKFKHQLQLVFVVAQKTTRRWFLDKLVDEIGVGYVHDYRGVAYYRLSQIKPLHNFLTQLQPFLKLKQKQANLVLKIIEQLPSAKESPDKFLEVCTWVDQIAALNDSKTRKTTSETVRAVLDSLPGSVGGLSPSQASSAASSASSSPGSGISEALRAGAGSGTGYNKEFLLYLAGFVDGDGSICASIRPCQVAKFKHALELRFTVGQKTKRRWFLDKLVDEIGVGYVYDLGGISQYNLSEIKPLHNFLTQLQPFLKLKQKQANLVLKIIEQLPSAKESPDKFLEVCTWVDQIAALNDSRTRKTTSETVRAVLDSLSEKKKSSP

SEQ ID NO: 278 - protein, 354 aa, Artificial Sequence
  Synthesized
MNTKYNKEFLLYLAGFVDADGSIYATIAPKQQLKFKHQLQLVFVVAQKTRRRWFLDKLVDEIGVGYVHDYGATSYYRLSEIKPLHNFLTQLQPFLKLKQKQANLVLKIIEQLPSAKESPDKFLEVCTWVDQIAALNDSKTRKTTSETVRAVLDSLPGSVGGLSPSQASSAASSASSSPGSGISEALRAGAGSGTGYNKEFLLYLAGFVDGDGSICASIRPCQVAKFKHALELRFTVGQSTRRRWFLDKLVDEIGVGYVYDLGGVAQYNLSQIKPLHNFLTQLQPFLKLKQKQANLVLKIIEQLPSAKESPDKFLEVCTWVDQIAALNDSRTRKTTSETVRAVLDSLSEKKKSSP

SEQ ID NO: 279 - protein, 325 aa, Artificial Sequence
  Synthesized
KQQLKFKHQLQLVFVVAQKTRRRWFLDKLVDEIGVGYVHDYSTVSYYRLSEIKPLHNFLTQLQPFLKLKQKQANLVLKIIEQLPSAKESPDKFLEVCTWVDQIAALNDSKTRKTTSETVRAVLDSLPGSVGGLSPSQASSAASSASSSPGSGISEALRAGAGSGTGYNKEFLLYLAGFVDGDGSICASIRPCQVAKFKHALELRFTVGQKTERRWFLDKLVDEIGVGYVYDLGKITQYNLSQIKPLHNFLTQLQPFLKLKQKQANLVLKIIEQLPSAKESPDKFLEVCTWVDQIAALNDSRTRKTTSETVRAVLDSLSEKKKSSP

SEQ ID NO: 280 - protein, 354 aa, Artificial Sequence
  Synthesized
MNTKYNKEFLLYLAGFVDADGSIYATIAPKQQLKFKHQLQLVFVVAQKTRRRWFLDKLVDEIGVGYVHDYSGTSYYRLSQIKPLHNFLTQLQPFLKLKQKQANLVLKIIEQLPSAKESPDKFLEVCTWVDQIAALNDSRTRKTTSETVRAVLDSLPGSVGGLSPSQASSAASSASSSPGSGISEALRAGAGSGTGYNKEFLLYLAGFVDGDGSICASIRPCQVAKFKHALELRFTVGQSTRRRWFLDKLVDEIGVGYVYDLGHISQYNLSEIKPLHNFLTQLQPFLKLKQKQANLVLKIIEQLPSAKESPDKFLEVCTWVDQIAALNDSKTRKTTSETVRAVLDSLSEKKKSSP

SEQ ID NO: 281 - protein, 354 aa, Artificial Sequence
  Synthesized
MNTKYNKEFLLYLAGFVDADGSIYATIAPKQQLKFKHQLQLVFVVAQKTRRRWFLDKLVDEIGVGYVHDYSGTSYYRLSQIKPLHNFLTQLQPFLKLKQKQANLVLKIIEQLPSAKESPDKFLEVCTWVDQIAALNDSKTRKTTSETVRAVLDSLPGSVGGLSPSQASSAASSASSSPGSGISEALRAGAGSGTGYNKEFLLYLAGFVDGDGSICASIRPCQVAKFKHALELRFTVGQKTCRRWFLDKLVDEIGVGYVYDLAHVSQYNLSQIKPLHNFLTQLQPFLKLKQKQANLVLKIIEQLPSAKESPDKFLEVCTWVDQIAALNDSRTRKTTSETVRAVLDSLSEKKKSSP

SEQ ID NO: 282 - protein, 354 aa, Artificial Sequence
  Synthesized
MNTKYNKEFLLYLAGFVDGDGSIYATIAPKQQLKFKHQLQLVFVVAQKTCRRWFLDKLVDEIGVGYVHDYRMVSYYRLSQIKPLHNFLTQLQPFLKLKQKQANLVLKIIEQLPSAKESPDKFLEVCTWVDQIAALNDSKTRKTTSETVRAVLDSLPGSVGGLSPSQASSAASSASSSPGSGISEALRAGAGSGTGYNKEFLLYLAGFVDADGSICASIRPCQVAKFKHALELRFTVGQTTKRRWFLDKLVDEIGVGYVYDLGRVSQYNLSQIKPLHNFLTQLQPFLKLKQKQANLVLKIIEQLPSAKESPDKFLEVCTWVDQIAALNDSKTRKTTSETVRAVLDSLSEKKKSSP

SEQ ID NO: 283 - protein, 354 aa, Artificial Sequence
  Synthesized
MNTKYNKEFLLYLAGFVDGDGSIYATIAPKQQLKFKHQLQLVFVVAQKTLRRWFLDKLVDEIGVGYVHDYRMVSYYRLSQIKPLHNFLTQLQPFLKLKQKQANLVLKIIEQLPSAKESPDKFLEVCTWVDQIAALNDSKTRKTTSETVRAVLDSLPGSVGGLSPSQASSAASSASSSPGSGISEALRAGAGSGTGYNKEFLLYLAGFVDADGSICASIRPCQVAKFKHALELRFTVGQSTRRRWFLDKLVDEIGVGYVYDLGRISQYNLSEIKPLHNFLTQLQPFLKLKQKQANLVLKIIEQLPSAKESPDKFLEVCTWVDQIAALNDSKTRKTTSETVRAVLDSLSEKKKSSP

SEQ ID NO: 284 - protein, 354 aa, Artificial Sequence
  Synthesized
MNTKYNKEFLLYLAGFVDGDGSIYATIAPKQQLKFKHQLQLVFVVAQKTRRRWFLDKLVDEIGVGYVHDYHATSYYRLSQIKPLHNFLTQLQPFLKLKQKQANLVLKIIEQLPSAKESPDKFLEVCTWVDQIAALNDSKTRKTTSETVRAVLDSLPGSVGGLSPSQASSAASSASSSPGSGISEALRAGAGSGTGYNKEFLLYLAGFVDADGSICASIRPCQVAKFKHALELRFTVGQSTRRRWFLDKLVDEIGVGYVYDLGCCSQYNLSEIKPLHNFLTQLQPFLKLKQKQANLVLKIIEQLPSAKESPDKFLEVCTWVDQIAALNDSKTRKTTSETVRAVLDSLSEKKKSSP

SEQ ID NO: 285 - protein, 354 aa, Artificial Sequence
  Synthesized
MNTKYNKEFLLYLAGFVDADGSIYATIAPKQQLKFKHQLQLVFVVAQHTRRRWFLDKLVDEIGVGYVHDYTRVSYYRLSEIKPLHNFLTQLQPFLKLKQKQANLVLKIIEQLPSAKESPDKFLEVCTWVDQIAALNDSKTRKTTSETVRAVLDSLPGSVGGLSPSQASSAASSASSSPGSGISEALRAGAGSGTGYNKEFLLYLAGFVDGDGSICASIRPCQVAKFKHALELRFTVGQTTKRRWFLDKLVDEIGVGYVYDLGKVAQYNLSQIKPLHNFLTQLQPFLKLKQKQANLVLKIIEQLPSAKESPDKFLEVCTWVDQIAALNDSKTRKTTSETVRAVLDSLSEKKKSSP

SEQ ID NO: 286 - protein, 354 aa, Artificial Sequence
  Synthesized
MNTKYNKEFLLYLAGFVDGDGSIYATIAPKQQLKFKHQLQLVFVVAQKTRRRWFLDKLVDEIGVGYVHDYRVTSYYRLSEIKPLHNFLTQLQPFLKLKQKQANLVLKIIEQLPSAKESPDKFLEVCTWVDQIAALNDSKTRKTTSETVRAVLDSLPGSVGGLSPSQASSAASSASSSPGSGISEALRAGAGSGTGYNKEFLLYLAGFVDADGSICASIRPCQVAKFKHALELRFTVGQSTKRRWFLDKLVDEIGVGYVYDLGSISQYNLSQIKPLHNFLTQLQPFLKLKQKQANLVLKIIEQLPSAKESPDKFLEVCTWVDQIAALNDSKTRKTTSETVRAVLDSLSEKKKSSP

SEQ ID NO: 287 - protein, 354 aa, Artificial Sequence
  Synthesized
MNTKYNKEFLLYLAGFVDADGSIYATIAPKQQLKFKHQLQLVFVVAQKTRRRWFLDKLVDEIGVGYVHDYSSTSYYRLSEIKPLHNFLTQLQPFLKLKQKQANLVLKIIEQLPSAKESPDKFLEVCTWVDQIAALNDSKTRKTTSETVRAVLDSLPGSVGGLSPSQASSAASSASSSPGSGISEALRAGAGSGTGYNKEFLLYLAGFVDGDGSICASIRPCQVAKFKHALELRFTVGQSTRRRWFLDKLVDEIGVGYVYDLGYVAQYNLSQIKPLHNFLTQLQPFLKLKQKQANLVLKIIEQLPSAKESPDKFLEVCTWVDQIAALNDSKTRKTTSETVRAVLDSLSEKKKSSP

SEQ ID NO: 288 - protein, 354 aa, Artificial Sequence
  Synthesized
MNTKYNKEFLLYLAGFVDADGSIYATIAPKQQLKFKHQLQLVFVVAQKTRRRWFLDKLVDEIGVGYVHDYGPTSYYRLSQIKPLHNFLTQLQPFLKLKQKQANLVLKIIEQLPSAKESPDKFLEVCTWVDQIAALNDSKTRKTTSETVRAVLDSLPGSVGGLSPSQASSAASSASSSPGSGISEALRAGAGSGTGYNKEFLLYLAGFVDGDGSICASIRPCQVAKFKHALELRFTVGQKTCRRWFLDKLVDEIGVGYVYDLGRIAQYNLSEIKPLHNFLTQLQPFLKLKQKQANLVLKIIEQLPSAKESPDKFLEVCTWVDQIAALNDSRTRKTTSETVRAVLDSLSEKKKSSP

SEQ ID NO: 289 - protein, 354 aa, Artificial Sequence
  Synthesized
MNTKYNKEFLLYLAGFVDGDGSIYATIAPKQQLKFKHQLQLVFVVAQKTRRRWFLDKLVDEIGVGYVHDYTNVSYYRLSEIKPLHNFLTQLQPFLKLKQKQANLVLKIIEQLPSAKESPDKFLEVCTWVDQIAALNDSKTRKTTSETVRAVLDSLPGSVGGLSPSQASSAASSASSSPGSGISEALRAGAGSGTGYNKEFLLYLAGFVDADGSICASIRPCQVAKFKHALELRFTVGQSTRRRWFLDKLVDEIGVGYVYDLGRIAQYNLSEIKPLHNFLTQLQPFLKLKQKQANLVLKIIEQLPSAKESPDKFLEVCTWVDQIAALNDSRTRKTTSETVRAVLDSLSEKKKSSP

SEQ ID NO: 290 - protein, 354 aa, Artificial Sequence
  Synthesized
MNTKYNKEFLLYLAGFVDSDGSIYATIAPKQQLKFKHQLQLVFVVAQKTRRRWFLDKLVDEIGVGYVHDYRNTSYYRLSQIKPLHNFLTQLQPFLKLKQKQANLVLKIIEQLPSAKESPDKFLEVCTWVDQIAALNDSKTRKTTSETVRAVLDSLPGSVGGLSPSQASSAASSASSSPGSGISEALRAGAGSGTGYNKEFLLYLAGFVDGDGSICASIRPCQVAKFKHALELRFTVGQTTRRRWFLDKLVDEIGVGYVYDLGKIAQYNLSEIKPLHNFLTQLQPFLKLKQKQANLVLKIIEQLPSAKESPDKFLEVCTWVDQIAALNDSKTRKTTSETVRAVLDSLSEKKKSSP

SEQ ID NO: 291 - protein, 354 aa, Artificial Sequence
  Synthesized
MNTKYNKEFLLYLAGFVDGDGSIYATIAPKQQLKFKHQLQLVFVVAQKTRRRWFLDKLVDEIGVGYVHDYRGVSYYRLSQIKPLHNFLTQLQPFLKLKQKQANLVLKIIEQLPSAKESPDKFLEVCTWVDQIAALNDSKTRKTTSETVRAVLDSLPGSVGGLSPSQASSAASSASSSPGSGISEALRAGAGSGTGYNKEFLLYLAGFVDADGSICASIRPCQVAKFKHALELRFTVGQKTCRRWFLDKLVDEIGVGYVYDLHKIAQYNLSEIKPLHNFLTQLQPFLKLKQKQANLVLKIIEQLPSAKESPDKFLEVCTWVDQIAALNDSRTRKTTSETVRAVLDSLSEKKKSSP

SEQ ID NO: 292 - DNA, 22 bp, Artificial Sequence
  Synthesized
gtatagcatgcattatacgaag

SEQ ID NO: 293 - DNA, 22 bp, Artificial Sequence
  Synthesized
catatcgtacgtaatatgcttc

SEQ ID NO: 294 - protein, 354 aa, Artificial Sequence
  Synthesized
MNTKYNKEFLLYLAGFVDADGSIYATIAPKQQLKFKHQLQLVFVVAQKTVRRWFLDKLVDEIGVGYVHDYATTSYYRLSEIKPLHNFLTQLQPFLKLKQKQANLVLKIIEQLPSAKESPDKFLEVCTWVDQIAALNDSKTRKTTSETVRAVLDSLPGSVGGLSPSQASSAASSASSSPGSGISEALRAGAGSGTGYNKEFLLYLAGFVDGDGSICASIRPCQVAKFKHALELRFTVGQHTRRRWFLDKLVDEIGVGYVYDLKACSQYNLSQIKPLHNFLTQLQPFLKLKQKQANLVLKIIEQLPSAKESPDKFLEVCTWVDQIAALNDSRTRKTTSETVRAVLDSLSEKKKSSP

SEQ ID NO: 295 - protein, 354 aa, Artificial Sequence
  Synthesized
MNTKYNKEFLLYLAGFVDADGSIYATIAPKQQLKFKHQLQLVFVVAQKTVRRWFLDKLVDEIGVGYVHDYHGVSYYRLSQIKPLHNFLTQLQPFLKLKQKQANLVLKIIEQLPSAKESPDKFLEVCTWVDQIAALNDSKTRKTTSETVRAVLDSLPGSVGGLSPSQASSAASSASSSPGSGISEALRAGAGSGTGYNKEFLLYLAGFVDGDGSICASIRPCQVAKFKHALELRFTVGQATRRRWFLDKLVDEIGVGYVYDLRGGCQYNLSEIKPLHNFLTQLQPFLKLKQKQANLVLKIIEQLPSAKESPDKFLEVCTWVDQIAALNDSKTRKTTSETVRAVLDSLSEKKKSSP

SEQ ID NO: 296 - protein, 354 aa, Artificial Sequence
  Synthesized
MNTKYNKEFLLYLAGFVDADGSIYATIAPKQQLKFKHQLQLVFVVAQKTRRRWFLDKLVDEIGVGYVHDYHSTSYYRLSQIKPLHNFLTQLQPFLKLKQKQANLVLKIIEQLPSAKESPDKFLEVCTWVDQIAALNDSHTRKTTSETVRAVLDSLPGSVGGLSPSQASSAASSASSSPGSGISEALRAGAGSGTGYNKEFLLYLAGFVDGDGSICASIRPCQVAKFKHALELRFTVGQKTSRRWFLDKLVDEIGVGYVYDLANCCQYNLSQIKPLHNFLTQLQPFLKLKQKQANLVLKIIEQLPSAKESPDKFLEVCTWVDQIAALNDSRTRKTTSETVRAVLDSLSEKKKSSP

SEQ ID NO: 297 - protein, 354 aa, Artificial Sequence
  Synthesized
MNTKYNKEFLLYLAGFVDGDGSIYATIAPKQQLKFKHQLQLVFVVAQKTRRRWFLDKLVDEIGVGYVHDYRQTSYYRLSQIKPLHNFLTQLQPFLKLKQKQANLVLKIIEQLPSAKESPDKFLEVCTWVDQIAALNDSKTRKTTSETVRAVLDSLPGSVGGLSPSQASSAASSASSSPGSGISEALRAGAGSGTGYNKEFLLYLAGFVDSDGSICASIRPCQVAKFKHALELRFTVGQATRRRWFLDKLVDEIGVGYVYDLKTGCQYNLSEIKPLHNFLTQLQPFLKLKQKQANLVLKIIEQLPSAKESPDKFLEVCTWVDQIAALNDSKTRKTTSETVRAVLDSLSEKKKSSP

SEQ ID NO: 298 - protein, 354 aa, Artificial Sequence
  Synthesized
MNTKYNKEFLLYLAGFVDADGSIYATIAPKQQLKFKHQLQLVFVVAQATRRRWFLDKLVDEIGVGYVHDYTRTSYYRLSEIKPLHNFLTQLQPFLKLKQKQANLVLKIIEQLPSAKESPDKFLEVCTWVDQIAALNDSKTRKTTSETVRAVLDSLPGSVGGLSPSQASSAASSASSSPGSGISEALRAGAGSGTGYNKEFLLYLAGFVDGDGSICASIRPCQVAKFKHALELRFTVGQHTKRRWFLDKLVDEIGVGYVYDLKGSSQYNLSQIKPLHNFLTQLQPFLKLKQKQANLVLKIIEQLPSAKESPDKFLEVCTWVDQIAALNDSKTRKTTSETVRAVLDSLSEKKKSSP

SEQ ID NO: 299 - protein, 354 aa, Artificial Sequence
  Synthesized
MNTKYNKEFLLYLAGFVDADGSIYATIAPKQQLKFKHQLQLVFVVAQKTRRRWFLDKLVDEIGVGYVHDYHQTSYYRLSQIKPLHNFLTQLQPFLKLKQKQANLVLKIIEQLPSAKESPDKFLEVCTWVDQIAALNDSKTRKITSETVRAVLDSLPGSVGGLSPSQASSAASSASSSPGSGISEALRAGAGSGTGYNKEFLLYLAGFVDGDGSICASIRPCQVAKFKHALELRFTVGQATRRRWFLDKLVDEIGVGYVYDLKTCAQYNLSEIKPLHNFLTQLQPFLKLKQKQANLVLKIIEQLPSAKESPDKFLEACTWVDQIAALNDSKTRKTTSETVRAVLDSLSEKKKSSP

SEQ ID NO: 300 - protein, 354 aa, Artificial Sequence
  Synthesized
MNTKYNKEFLLYLAGFVDADGSIYATIAPKQQLKFKHQLQLVFVVAQKTRRRWFLDKLVDEIGVGYVHDYRTTSYYRLSQIKPLHNFLTQLQPFLKLKQKQANLVLKIIEQLPSAKESPDKFLEVCTWVDQIAALNDSKTRKTTSETVRAVLDSLPGSVGGLSPSQASSAASSASSSPGSGISEALRAGAGSGTGYNKEFLLYLAGFVDGDGSICASIRPCQVAKFKHALELRFTVGQATRRRWFLDKLVDEIGVGYVYDLGSGSQYNLSEIKPLHNFLTQLQPFLKLKQKQANLVLKIIEQLPSAKESPDKFLEVCTWVDQIAALNDSRTRKTTSETVRAVLDSLSEKKKSSP

SEQ ID NO: 301 - protein, 354 aa, Artificial Sequence
  Synthesized
MNTKYNKEFLLYLAGFVDADGSIYATIAPKQQLKFKHQLQLVFVVAQHTRRRWFLDKLVDEIGVGYVHDYRRVSYYRLSQIKPLHNFLTQLQPFLKLKQKQANLVLKIIEQLPSAKESPDKFLEVCTWVDQIAALNDSKTRKTTSETVRAVLDSLPGSVGGLSPSQASSAASSASSSPGSGISEALRAGAGSGTGYNKEFLLYLAGFVDGDGSICASIRPCQVAKFKHALELRFTVGQTTRRRWFLDKLVDEIGVGYVYDLKGASQYNLSEIKPLHNFLTQLQPFLKLKQKQANLVLKIIEQLPSAKESPDKFLEVCTWVDQIAALNDSKTRKTTSETVRAVLDSLSEKKKSSP

SEQ ID NO: 302 - protein, 354 aa, Artificial Sequence
  Synthesized
MNTKYNKEFLLYLAGFVDADGSIYATIAPKQQLKFKHQLQLVFVVAQKTRRRWFLDKLVDEIGVGYVHDYGTVSYYRLSEIKPLHNFLTQLQPFLKLKQKQANLVLKIIEQLPSAKESPDKFLEVCTWVDQIAALNDSKTRKTTSETVRAVLDSLPGSVGGLSPSQASSAASSASSSPGSGISEALRAGAGSGTGYNKEFLLYLAGFVDGDGSICASIRPCQVAKFKHALELRFTVGQTTQRRWFLDKLVDEIGVGYVYDLGRSCQYNLSEIKPLHNFLTQLQPFLKLKQKQANLVLKIIEQLPSAKESPDKFLEVCTWVDQIAALNDSKTRKTTSETVRAVLDSLSEKKKSSP

SEQ ID NO: 303 - protein, 354 aa, Artificial Sequence
  Synthesized
MNTKYNKEFLLYLAGFVDADGSIYATIAPKQQLKFKHQLQLVFVVAQKTKRRWFLDKLVDEIGVGYVHDYNGTAYYRLSQIKPLHNFLTQLQPFLKLKQKQANLVLKIIEQLPSAKESPDKFLEVCTWVDQIAALNDSKTRKTTSETVRAVLDSLPGSVGGLSPSQASSAASSASSSPGSGISEALRAGAGSGTGYNKEFLLYLAGFVDGDGSICASIRPCQVAKFKHALELRFTVGQATHRRWFLDKLVDEIGVGYVYDLRRCAQYNLSEIKPLHNFLTQLQPFLKLKQKQANLVLKIIEQLPSAKESPDKFLEVCTWVDQIAALNDSKTRKTTSETVRAVLDSLSEKKKSSP

SEQ ID NO: 304 - protein, 354 aa, Artificial Sequence
  Synthesized
MNTKYNKEFLLYLAGFVDADGSIYATIAPKQQLKFKHQLQLVFVVAQHTRRRWFLDKLVDEIGVGYVHDYSRTSYYRLSQIKPLHNFLTQLQPFLKLKQKQANLVLKIIEQLPSAKESPDKFLEVCTWVDQIAALNDSKTRKTTSETVRAVLDSLPGSVGGLSPSQASSAASSASSSPGSGISEALRAGAGSGTGYNKEFLLYLAGFVDGDGSICASIRPCQVAKFKHALELRFTVGQLTRRRWFLDKLVDEIGVGYVYDLGHSCQYNLSEIKPLHNFLTQLQPFLKLKQKQANLVLKIIEQLPSAKESPDKFLEVCTWVDQIAALNDSKTRKTTSETVRAVLDSLSEKKKSSP

SEQ ID NO: 305 - protein, 354 aa, Artificial Sequence
  Synthesized
MNTKYNKEFLLYLAGFVDADGSIYATIAPKQQLKFKHQLQLVFVVAQKTRRRWFLDKLVDEIGVGYVHDYGRTSYYRLSQIKPLHNFLTQLQPFLKLKQKQANLVLKIIEQLPSAKESPDKFLEVCTWVDQIAALNDSKTRKTTSETVRAVLDSLPGSVGGLSPSQASSAASSASSSPGSGISEALRAGAGSGTGYNKEFLLYLAGFVDGDGSICASIRPCQVAKFKHALELRFTVGQKTKRRWFLDKLVDEIGVGYVYDLTQCCQYNLSEIKPLHNFLTQLQPFLKLKQKQANLVLKIIEQLPSAKESPDKFLEVCTWVDQIAALNDSKTRKTTSETVRAVLDSLSEKKKSSP

SEQ ID NO: 306 - protein, 354 aa, Artificial Sequence
  Synthesized
MNTKYNKEFLLYLAGFVDADGSIYATIAPKQQLKFKHQLQLVFVVAQKTSRRWFLDKLVDEIGVGYVHDYRNCSYYRLSQIKPLHNFLTQLQPFLKLKQKQANLVLKIIEQLPSAKESPDKFLEVCTWVDQIAALNDSRTRKTTSETVRAVLDSLPGSVGGLSPSQASSAASSASSSPGSGISEALRAGAGSGTGYNKEFLLYLAGFVDGDGSICASIRPCQVAKFKHALELRFTVGQHTKRRWFLDKLVDEIGVGYVYDLRRSCQYNLSEIKPLHNFLTQLQPFLKLKQKQANLVLKIIEQLPSAKESPDKFLEVCTWVDQIAALNDSKTRKTTSETVRAVLDSLSEKKKSSP

SEQ ID NO: 307 - protein, 354 aa, Artificial Sequence
  Synthesized
MNTKYNKEFLLYLAGFVDGDGSIYATIAPKQQLKFKHQLQLVFVVAQHTRRRWFLDKLVDEIGVGYVHDYNGTSYYRLSEIKPLHNFLTQLQPFLKLKQKQANLVLKIIEQLPSAKESPDKFLEVCTWVDQIAALNDSKTRKTTSETVRAVLDSLPGSVGGLSPSQASSAASSASSSPGSGISEALRAGAGSGTGYNKEFLLYLAGFVDADGSICASIRPCQVAKFKHALELRFTVGQLTKRRWFLDKLVDEIGVGYVYDLRACCQYNLSEIKPLHNFLTQLQPFLKLKQKQANLVLKIIEQLPSAKESPDKFLEVCTWVDQIAALNDSKTRKTTSETVRAVLDSLSEKKKSSP

SEQ ID NO: 308 - protein, 354 aa, Artificial Sequence
  Synthesized
MNTKYNKEFLLYLAGFVDADGSIYATIAPKQQLKFKHQLQLVFVVAQKTRRRWFLDKLVDEIGVGYVHDYRNTSYYRLSQIKPLHNFLTQLQPFLKLKQKQANLVLKIIEQLPSAKESPDKFLEVCTWVDQIAALNDSKTRKTTSETVRAVLDSLPGSVGGLSPSQASSAASSASSSPGSGISEALRAGAGSGTGYNKEFLLYLAGFVDGDGSICASIRPCQVAKFKHALELRFTVGQITKRRWFLDKLVDEIGVGYVYDLGNSCQYNLSEIKPLHNFLTQLQPFLKLKQKQANLVLKIIEQLPSAKESPDKFLEVCTWVDQIAALNDSKTRKTTSETVRAVLDSLSEKKKSSP

SEQ ID NO: 309 - protein, 354 aa, Artificial Sequence
  Synthesized
MNTKYNKEFLLYLAGFVDGDGSIYATIAPKQQLKFKHQLQLVFVVAQRTRRRWFLDKLVDEIGVGYVHDYTGVSYYRLSQIKPLHNFLTQLQPFLKLKQKQANLVLKIIEQLPSAKESPDKFLEVCTWVDQIAALNDSKTRKTTSETVRAVLDSLPGSVGGLSPSQASSAASSASSSPGSGISEALRAGAGSGTGYNKEFLLYLAGFVDSDGSICASIRPCQVAKFKHALELRFTVGQATKRRWFLDKLVDEIGVGYVYDLKACCQYNLSEIKPLHNFLTQLQPFLKLKQKQANLVLKIIEQLPSAKESPDKFLEVCTWVDQIAALNDSKTRKTTSETVRAVLDSLSEKKKSSP

SEQ ID NO: 310 - protein, 354 aa, Artificial Sequence
  Synthesized
MNTKYNKEFLLYLAGFVDADGSIYATIAPKQQLKFKHQLQLVFVVAQKTRRRWFLDKLVDEIGVGYVHDYHATSYYRLSQIKPLHNFLTQLQPFLKLKQKQANLVLKIIEQLPSAKESPDKFLEVCTWVDQIAALNDSKTRKTTSETVRAVLDSLPGSVGGLSPSQASSAASSASSSPGSGISEALRAGAGSGTGYNKEFLLYLAGFVDGDGSICASIRPCQVAKFKHALELRFTVGQKTVRRWFLDKLVDEIGVGYVYDLRKCSQYNLSQIKPLHNFLTQLQPFLKLKQKQANLVLKIIEQLPSAKESPDKFLEVCTWVDQIAALNDSKTRKTTSETVRAVLDSLSEKKKSSP

SEQ ID NO: 311 - protein, 354 aa, Artificial Sequence
  Synthesized
MNTKYNKEFLLYLAGFVDGDGSIYATIAPKQQLKFKHQLQLVFVVAQKTRRRWFLDKLVDEIGVGYVHDYRGVSYYRLSEIKPLHNFLTQLQPFLKLKQKQANLVLKIIEQLPSAKESPDKFLEVCTWVDQIAALNDSKTRKTTSETVRAVLDSLPGSVGGLSPSQASSAASSASSSPGSGISEALRAGAGSGTGYNKEFLLYLAGFVDADGSICASIRPCQVAKFKHALELRFTVGQATSRRWFLDKLVDEIGVGYVYDLHGACQYNLSQIKPLHNFLTQLQPFLKLKQKQANLVLKIIEQLPSAKESPDKFLEVCTWVDQIAALNDSHTRKTTSETVRAVLDSLSEKKKSSP

SEQ ID NO: 312 - protein, 354 aa, Artificial Sequence
  Synthesized
MNTKYNKEFLLYLAGFVDADGSIYATIAPKQQLKFKHQLQLVFVVAQKTRRRWFLDKLVDEIGVGYVHDYAATSYYRLSQIKPLHNFLTQLQPFLKLKQKQANLVLKIIEQLPSAKESPDKFLEVCTWVDQIAALNDSKTRKTTSETVRAVLDSLPGSVGGLSPSQASSAASSASSSPGSGISEALRAGAGSGTGYNKEFLLYLAGFVDGDGSICASIRPCQVAKFKHALELRFTVGQATHRRWFLDKLVDEIGVGYVYDLGTSAQYNLSQIKPLHNFLTQLQPFLKLKQKQANLVLKIIEQLPSAKESPDKFLEVCTWVDQIAALNDSKTRKTTSETVRAVLDSLSEKKKSSP

SEQ ID NO: 313 - protein, 354 aa, Artificial Sequence
  Synthesized
MNTKYNKEFLLYLAGFVDGDGSIYATIAPKQQLKFKHQLQLVFVVAQKTRRRWFLDKLVDEIGVGYVHDYASTSYYRLSEIKPLHNFLTQLQPFLKLKQKQANLVLKIIEQLPSAKESPDKFLEVCTWVDQIAALNDSKTRKTTSETVRAVLDSLPGSVGGLSPSQASSAASSASSSPGSGISEALRAGAGSGTGYNKEFLLYLAGFVDADGSICASIRPCQVAKFKHALELRFTVGQHTKRRWFLDKLVDEIGVGYVYDLYRCCQYNLSEIKPLHNFLTQLQPFLKLKQKQANLVLKIIEQLPSAKESPDKFLEVCTWVDQIAALNDSKTRKTTSETVRAVLDSLSEKKKSSP

SEQ ID NO: 314 - DNA, 22 bp, Artificial Sequence
  Synthesized
gtatagcatgcgatatacgaag

SEQ ID NO: 315 - DNA, 22 bp, Artificial Sequence
  Synthesized
catatcgtacgctatatgcttc

SEQ ID NO: 316 - protein, 354 aa, Artificial Sequence
  Synthesized
MNTKYNKEFLLYLAGFVDGDGSIYATIAPKQQLKFKHQLQLVFVVAQKTKRRWFLDKLVDEIGVGYVHDYRNVSYYRLSEIKPLHNFLTQLQPFLKLKQKQANLVLKIIEQLPSAKESPDKFLEVCTWVDQIAALNDSKTRKTTSETVRAVLDSLPGSVGGLSPSQASSAASSASSSPGSGISEALRAGAGSGTGYNKEFLLYLAGFVDSDGSICASIRPCQVAKFKHALELRFTVGQKTCRRWFLDKLVDEIGVGYVYDLGRVSQYNLSQIKPLHNFLTQLQPFLKLKQKQANLVLKIIEQLPSAKESPDKFLEVCTWVDQIAALNDSRTRKTTSETVRAVLDSLSEKKKSSP

SEQ ID NO: 317 - protein, 354 aa, Artificial Sequence
  Synthesized
MNTKYNKEFLLYLAGFVDADGSIYATIAPKQQLKFKHQLQLVFVVAQKTRRRWFLDKLVDEIGVGYVHDYSGTSYYRLSQIKPLHNFLTQLQPFLKLKQKQANLVLKIIEQLPSAKESPDKFLEVCTWVDQIAALNDSKTRKTTSETVRAVLDSLPGSVGGLSPSQASSAASSASSSPGSGISEALRAGAGSGTGYNKEFLLYLAGFVDGDGSICASIRPCQVAKFKHALELRFTVGQTTRRRWFLDKLVDEIGVGYVYDLGRISQYNLSQIKPLHNFLTQLQPFLKLKQKQANLVLKIIEQLPSAKESPDKFLEVCTWVDQIAALNDSRTRKTTSETVRAVLDSLSEKKKSSP

SEQ ID NO: 318 - protein, 354 aa, Artificial Sequence
  Synthesized
MNTKYNKEFLLYLAGFVDSDGSIYATIAPKQQLKFKHQLQLVFVVAQKTRRRWFLDKLVDEIGVGYVHDYSGTSYYRLSQIKPLHNFLTQLQPFLKLKQKQANLVLKIIEQLPSAKESPDKFLEVCTWVDQIAALNDSKTRKTTSETVRAVLDSLPGSVGGLSPSQASSAASSASSSPGSGISEALRAGAGSGTGYNKEFLLYLAGFVDGDGSICASIRPCQVAKFKHALELRFTVGQSTRRRWFLDKLVDEIGVGYVYDLGRISQYNLSEIKPLHNFLTQLQPFLKLKQKQANLVLKIIEQLPSAKESPDKFLEVCTWVDQIAALNDSRTRKTTSETVRAVLDSLSEKKKSSP

SEQ ID NO: 319 - protein, 354 aa, Artificial Sequence
  Synthesized
MNTKYNKEFLLYLAGFVDGDGSIYATIAPKQQLKFKHQLQLVFVVAQKTRRRWFLDKLVDEIGVGYVHDYRAVSYYRLSEIKPLHNFLTQLQPFLKLKQKQANLVLKIIEQLPSAKESPDKFLEVCTWVDQIAALNDSKTRKTTSETVRAVLDSLPGSVGGLSPSQASSAASSASSSPGSGISEALRAGAGSGTGYNKEFLLYLAGFVDADGSICASIRPCQVAKFKHALELRFTVGQATRRRWFLDKLVDEIGVGYVYDLGRISQYNLSQIKPLHNFLTQLQPFLKLKQKQANLVLKIIEQLPSAKESPDKFLEVCTWVDQIAALNDSRTRKTTSETVRAVLDSLSEKKKSSP

SEQ ID NO: 320 - protein, 354 aa, Artificial Sequence
  Synthesized
MNTKYNKEFLLYLAGFVDSDGSIYATIAPKQQLKFKHQLQLVFVVAQKTKRRWFLDKLVDEIGVGYVHDYAGIAYYRLSEIKPLHNFLTQLQPFLKLKQKQANLVLKIIEQLPSAKESPDKFLEVCTWVDQIAALNDSKTRKTTSETVRAVLDSLPGSVGGLSPSQASSAASSASSSPGSGISEALRAGAGSGTGYNKEFLLYLAGFVDGDGSICASIRPCQVAKFKHALELRFTVGQSTRRRWFLDKLVDEIGVGYVYDLGRISQYNLSQIKPLHNFLTQLQPFLKLKQKQANLVLKIIEQLPSAKESPDKFLEVCTWVDQIAALNDSRTRKTTSETVRAVLDSLSEKKKSSP

SEQ ID NO: 321 - protein, 354 aa, Artificial Sequence
  Synthesized
MNTKYNKEFLLYLAGFVDGDGSIYATIAPKQQLKFKHQLQLVFVVAQKTRRRWFLDKLVDEIGVGYVHDYRGVSYYRLSEIKPLHNFLTQLQPFLKLKQKQANLVLKIIEQLPSAKESPDKFLEVCTWVDQIAALNDSKTRKTTSETVRAVLDSLPGSVGGLSPSQASSAASSASSSPGSGISEALRAGAGSGTGYNKEFLLYLAGFVDGDGSICASIRPCQVAKFKHALELRFTVGQQTRRRWFLDKLVDEIGVGYVYDLGRISQYNLSQIKPLHNFLTQLQPFLKLKQKQANLVLKIIEQLPSAKESPDKFLEVCTWVDQIAALNDSRTRKTTSETVRAVLDSLSEKKKSSP

SEQ ID NO: 322 - protein, 354 aa, Artificial Sequence
  Synthesized
MNTKYNKEFLLYLAGFVDGDGSIYATIAPKQQLKFKHQLQLVFVVAQKTRRRWFLDKLVDEIGVGYVHDYGGVSYYRLSQIKPLHNFLTQLQPFLKLKQKQANLVLKIIEQLPSAKESPDKFLEVCTWVDQIAALNDSKTRKTTSETVRAVLDSLPGSVGGLSPSQASSAASSASSSPGSGISEALRAGAGSGTGYNKEFLLYLAGFVDGDGSICASIRPCQVAKFKHALELRFTVGQATRRRWFLDKLVDEIGVGYVYDLGRIAQYNLSQIKPLHNFLTQLQPFLKLKQKQANLVLKIIEQLPSAKESPDKFLEVCTWVDQIAALNDSRTRKTTSETVRAVLDSLSEKKKSSP

SEQ ID NO: 323 - protein, 354 aa, Artificial Sequence
  Synthesized
MNTKYNKEFLLYLAGFVDADGSIYATIAPKQQLKFKHQLQLVFVVAQKTRRRWFLDKLVDEIGVGYVHDYSGVSYYRLSEIKPLHNFLTQLQPFLKLKQKQANLVLKIIEQLPSAKESPDKFLEVCTWVDQIAALNDSKTRKTTSETVRAVLDSLPGSVGGLSPSQASSAASSASSSPGSGISEALRAGAGSGTGYNKEFLLYLAGFVDGDGSICASIRPCQVAKFKHALELRFTVGQQTRRRWFLDKLVDEIGVGYVYDLGRISQYNLSQIKPLHNFLTQLQPFLKLKQKQANLVLKIIEQLPSAKESPDKFLEVCTWVDQIAALNDSRTRKTTSETVRAVLDSLSEKKKSSP

SEQ ID NO: 324 - protein, 354 aa, Artificial Sequence
  Synthesized
MNTKYNKEFLLYLAGFVDADGSIYATIAPKQQLKFKHQLQLVFVVAQKTRRRWFLDKLVDEIGVGYVHDYNRVSYYRLSQIKPLHNFLTQLQPFLKLKQKQANLVLKIIEQLPSAKESPDKFLEVCTWVDQIAALNDSKTRKTTSETVRAVLDSLPGSVGGLSPSQASSAASSASSSPGSGISEALRAGAGSGTGYNKEFLLYLAGFVDGDGSICASIRPCQVAKFKHALELRFTVGQSTRRRWFLDKLVDEIGVGYVYDLGRISQYNLSEIKPLHNFLTQLQPFLKLKQKQANLVLKIIEQLPSAKESPDKFLEVCTWVDQIAALNDSRTRKTTSETVRAVLDSLSEKKKSSP

SEQ ID NO: 325 - protein, 354 aa, Artificial Sequence
  Synthesized
MNTKYNKEFLLYLAGFVDGDGSIYATIAPKQQLKFKHQLQLVFVVAQKTRRRWFLDKLVDEIGVGYVHDYRQVSYYRLSEIKPLHNFLTQLQPFLKLKQKQANLVLKIIEQLPSAKESPDKFLEVCTWVDQIAALNDSKTRKTTSETVRAVLDSLPGSVGGLSPSQASSAASSASSSPGSGISEALRAGAGSGTGYNKEFLLYLAGFVDADGSICASIRPCQVAKFKHALELRFTVGQATRRRWFLDKLVDEIGVGYVYDLGRISQYNLSQIKPLHNFLTQLQPFLKLKQKQANLVLKIIEQLPSAKESPDKFLEVCTWVDQIAALNDSRTRKTTSETVRAVLDSLSEKKKSSP

SEQ ID NO: 326 - DNA, 22 bp, Artificial Sequence
  Synthesized
gtatagcatgcagtatacgaag

SEQ ID NO: 327 - DNA, 22 bp, Artificial Sequence
  Synthesized
catatcgtacgtcatatgcttc

SEQ ID NO: 328 - protein, 351 aa, Artificial Sequence
  Synthesized
MNTKYNKEFLLLAFVDADSIYATIAPKQQLKFKHQLQLVFVVAQKTRRRWFLDKLVDEIGVGYVHDYSGRSYYRLSQIKPLHNFLTQLQPFLKLKQKQANLVLKIIEQLPSAKESPDKFLEVCTWVDQIAALNDSKTRKTTSETVRAVLDSLPGSVGGLSPSQASSAASSASSSPGSGISEALRAGAGSGTGYNKEFLLYLAGFVDGDGSICASIRPCQVAKFKHALELRFTVGQKTQRRWFLDKLVDEIGVGYVYDLGSVSQYTLSQIKPLHNFLTQLQPFLKLKQKQANLVLKIIEQLPSAKESPDKFLEVCTWVDQIAALNDSKTRKTTSETVRAVLDSLSEKKKSSP

SEQ ID NO: 329 - protein, 351 aa, Artificial Sequence
  Synthesized
MNTKYNKEFLLLAFVDADSIYATIAPKQQLKFKHQLQLVFVVAQKTRRRWFLDKLVDEIGVGYVHDYSGRSYYRLSQIKPLHNFLTQLQPFLKLKQKQANLVLKIIEQLPSAKESPDKFLEVCTWVDQIAALNDSKTRKTTSETVRAVLDSLPGSVGGLSPSQASSAASSASSSPGSGISEALRAGAGSGTGYNKEFLLYLAGFVDGDGSICASIRPCQVAKFKHALELRFTVGQHTRRRWFLDKLVDEIGVGYVYDLGSVSQYTLSQIKPLHNFLTQLQPFLKLKQKQANLVLKIIEQLPSAKESPDKFLEVCTWVDQIAALNDSKTRKTTSETVRAVLDSLSEKKKSSP

SEQ ID NO: 330 - protein, 351 aa, Artificial Sequence
  Synthesized
MNTKYNKEFLLLAFVDADSIYATIAPKQQLKFKHQLQLVFVVAQKTRRRWFLDKLVDEIGVGYVHDYSGRSYYRLSQIKPLHNFLTQLQPFLKLKQKQANLVLKIIEQLPSAKESPDKFLEVCTWVDQIAALNDSKTRKTTSETVRAVLDSLPGSVGGLSPSQASSAASSASSSPGSGISEALRAGAGSGTGYNKEFLLYLAGFVDGDGSICASIRPCQVAKFKHALELRFTVGQHTRRRWFLDKLVDEIGVGYVYDLGRTSQYTLSQIKPLHNFLTQLQPFLKLKQKQANLVLKIIEQLPSAKESPDKFLEVCTWVDQIAALNDSKTRKTTSETVRAVLDSLSEKKKSSP

SEQ ID NO: 331 - DNA, 22 bp, Artificial Sequence
  Synthesized
gtatagcattcaatatacgaag

SEQ ID NO: 332 - DNA, 22 bp, Artificial Sequence
  Synthesized
catatcgtaagttatatgcttc

SEQ ID NO: 333 - protein, 354 aa, Artificial Sequence
  Synthesized
MNTKYNKEFLLYLAGFVDSDGSIYATIAPKQQLKFKHQLQLVFVVAQSTRRRWFLDKLVDEIGVGYVHDYGSVSYYRLSEIKPLHNFLTQLQPFLKLKQKQANLVLKIIEQLPSAKESPDKFLEVCTWVDQIAALNDSKTRKTTSETVRAVLDSLPGSVGGLSPSQASSAASSASSSPGSGISEALRAGAGSGTGYNKEFLLYLAGFVDGDGSICASIRPCQVAKFKHALELRFTVGQSTKRRWFLDKLVDEIGVGYVYDLGRIAQYNLSQIKPLHNFLTQLQPFLKLKQKQANLVLKIIEQLPSAKESPDKFLEVCTWVDQIAALNDSRTRKTTSETVRAVLDSLSEKKKSSP

SEQ ID NO: 334 - protein, 354 aa, Artificial Sequence
  Synthesized
MNTKYNKEFLLYLAGFVDSDGSIYATIAPKQQLKFKHQLQLVFVVAQSTRRRWFLDKLVDEIGVGYVHDYRSVSYYRLSEIKPLHNFLTQLQPFLKLKQKQANLVLKIIEQLPSAKESPDKFLEVCTWVDQIAALNDSKTRKTTSETVRAVLDSLPGSVGGLSPSQASSAASSASSSPGSGISEALRAGAGSGTGYNKEFLLYLAGFVDGDGSICASIRPCQVAKFKHALELRFTVGQSTRRRWFLDKLVDEIGVGYVYDLGQIAQYNLSQIKPLHNFLTQLQPFLKLKQKQANLVLKIIEQLPSAKESPDKFLEVCTWVDQIAALNDSRTRKTTSETVRAVLDSLSEKKKSSP

SEQ ID NO: 335 - protein, 354 aa, Artificial Sequence
  Synthesized
MNTKYNKEFLLYLAGFVDADGSIYATIAPKQQLKFKHQLQLVFVVAQKTRRRWFLDKLVDEIGVGYVHDYGSVSYYRLSEIKPLHNFLTQLQPFLKLKQKQANLVLKIIEQLPSAKESPDKFLEVCTWVDQIAALNDSKTRKTTSETVRAVLDSLPGSVGGLSPSQASSAASSASSSPGSGISEALRAGAGSGTGYNKEFLLYLAGFVDGDGSICASIRPCQVAKFKHALELRFTVGQKTCRRWFLDKLVDEIGVGYVYDLGRIAQYNLSEIKPLHNFLTQLQPFLKLKQKQANLVLKIIEQLPSAKESPDKFLEVCTWVDQIAALNDSRTRKTTSETVRAVLDSLSEKKKSSP

SEQ ID NO: 336 - protein, 354 aa, Artificial Sequence
  Synthesized
MNTKYNKEFLLYLAGFVDADGSIYATIAPKQQLKFKHQLQLVFVVAQKTTRRWFLDKLVDEIGVGYVHDYGPVSYYRLSQIKPLHNFLTQLQPFLKLKQKQANLVLKIIEQLPSAKESPDKFLEVCTWVDQIAALNDSKTRKTTSETVRAVLDSLPGSVGGLSPSQASSAASSASSSPGSGISEALRAGAGSGTGYNKEFLLYLAGFVDGDGSICASIRPCQVAKFKHALELRFTVGQSTKRRWFLDKLVDEIGVGYVYDLGRIAQYNLSEIKPLHNFLTQLQPFLKLKQKQANLVLKIIEQLPSAKESPDKFLEVCTWVDQIAALNDSRTRKTTSETVRAVLDSLSEKKKSSP

SEQ ID NO: 337 - protein, 354 aa, Artificial Sequence
  Synthesized
MNTKYNKEFLLYLAGFVDSDGSIYATIAPKQQLKFKHQLQLVFVVAQSTRRRWFLDKLVDEIGVGYVHDYGTVSYYRLSEIKPLHNFLTQLQPFLKLKQKQANLVLKIIEQLPSAKESPDKFLEVCTWVDQIAALNDSKTRKTTSETVRAVLDSLPGSVGGLSPSQASSAASSASSSPGSGISEALRAGAGSGTGYNKEFLLYLAGFVDGDGSICASIRPCQVAKFKHALELRFTVGQKTERRWFLDKLVDEIGVGYVYDLGRIAQYNLSQIKPLHNFLTQLQPFLKLKQKQANLVLKIIEQLPSAKESPDKFLEVCTWVDQIAALNDSRTRKTTSETVRAVLDSLSEKKKSSP

SEQ ID NO: 338 - protein, 354 aa, Artificial Sequence
  Synthesized
MNTKYNKEFLLYLAGFVDADGSIYATIAPKQQLKFKHQLQLVFVVAQKTTRRWFLDKLVDEIGVGYVHDYGRVSYYRLSQIKPLHNFLTQLQPFLKLKQKQANLVLKIIEQLPSAKESPDKFLEVCTWVDQIAALNDSRTRKTTSETVRAVLDSLPGSVGGLSPSQASSAASSASSSPGSGISEALRAGAGSGTGYNKEFLLYLAGFVDGDGSICASIRPCQVAKFKHALELRFTVGQKTCRRWFLDKLVDEIGVGYVYDLGNIAQYNLSQIKPLHNFLTQLQPFLKLKQKQANLVLKIIEQLPSAKESPDKFLEVCTWVDQIAALNDSRTRKTTSETVRAVLDSLSEKKKSSP

SEQ ID NO: 339 - protein, 354 aa, Artificial Sequence
  Synthesized
MNTKYNKEFLLYLAGFVDADGSIYATIAPKQQLKFKHQLQLVFVVAQKTCRRWFLDKLVDEIGVGYVHDYTGVSYYRLSQIKPLHNFLTQLQPFLKLKQKQANLVLKIIEQLPSAKESPDKFLEVCTWVDQIAALNDSRTRKTTSETVRAVLDSLPGSVGGLSPSQASSAASSASSSPGSGISEALRAGAGSGTGYNKEFLLYLAGFVDGDGSICASIRPCQVAKFKHALELRFTVGQSTKRRWFLDKLVDEIGVGYVYDLGQISQYNLSQIKPLHNFLTQLQPFLKLKQKQANLVLKIIEQLPSAKESPDKFLEVCTWVDQIAALNDSRTRKTTSETVRAVLDSLSEKKKSSP

SEQ ID NO: 340 - protein, 354 aa, Artificial Sequence
  Synthesized
MNTKYNKEFLLYLAGFVDSDGSIYATIAPKQQLKFKHQLQLVFVVAQSTRRRWFLDKLVDEIGVGYVHDYGSVSYYRLSEIKPLHNFLTQLQPFLKLKQKQANLVLKIIEQLPSAKESPDKFLEVCTWVDQIAALNDSKTRKTTSETVRAVLDSLPGSVGGLSPSQASSAASSASSSPGSGISEALRAGAGSGTGYNKEFLLYLAGFVDSDGSICASIRPCQVAKFKHALELRFTVGQSTKRRWFLDKLVDEIGVGYVYDLGSIAQYNLSQIKPLHNFLTQLQPFLKLKQKQANLVLKIIEQLPSAKESPDKFLEVCTWVDQIAALNDSRTRKTTSETVRAVLDSLSEKKKSSP

SEQ ID NO: 341 - DNA, 22 bp, Artificial Sequence
  Synthesized
gtatagcatttaatatacgaag

SEQ ID NO: 342 - DNA, 22 bp, Artificial Sequence
  Synthesized
catatcgtaaattatatgcttc

SEQ ID NO: 343 - protein, 354 aa, Artificial Sequence
  Synthesized
MNTKYNKEFLLYLAGFVDGDGSIYATIAPKQQLKFKHQLQLVFVVAQNTRRRWFLDKLVDEIGVGYVHDYGTVSYYRLSQIKPLHNFLTQLQPFLKLKQKQANLVLKIIEQLPSAKESPDKFLEVCTWVDQIAALNDSRTRKTTSETVRAVLDSLPGSVGGLSPSQASSAASSASSSPGSGISEALRAGAGSGTGYNKEFLLYLAGFVDADGSICASIRPCQVAKFKHALELRFTVGQKTCRRWFLDKLVDEIGVGYVYDLGKISQYNLSQIKPLHNFLTQLQPFLKLKQKQANLVLKIIEQLPSAKESPDKFLEVCTWVDQIAALNDSRTRKTTSETVRAVLDSLSEKKKSSP

SEQ ID NO: 344 - protein, 354 aa, Artificial Sequence
  Synthesized
MNTKYNKEFLLYLAGFVDSDGSIYATIAPKQQLKFKHQLQLVFVVAQKTVRRWFLDKLVDEIGVGYVHDYRSVSYYRLSQIKPLHNFLTQLQPFLKLKQKQANLVLKIIEQLPSAKESPDKFLEVCTWVDQIAALNDSRTRKTTSETVRAVLDSLPGSVGGLSPSQASSAASSASSSPGSGISEALRAGAGSGTGYNKEFLLYLAGFVDGDGSICASIRPCQVAKFKHALELRFTVGQSTKRRWFLDKLVDEIGVGYVYDLGRIAQYNLSQIKPLHNFLTQLQPFLKLKQKQANLVLKIIEQLPSAKESPDKFLEVCTWVDQIAALNDSRTRKTTSETVRAVLDSLSEKKKSSP

SEQ ID NO: 345 - protein, 354 aa, Artificial Sequence
  Synthesized
MNTKYNKEFLLYLAGFVDSDGSIYATIAPKQQLKFKHQLQLVFVVAQSTRRRWFLDKLVDEIGVGYVHDYNNVAYYRLSEIKPLHNFLTQLQPFLKLKQKQANLVLKIIEQLPSAKESPDKFLEVCTWVDQIAALNDSRTRKTTSETVRAVLDSLPGSVGGLSPSQASSAASSASSSPGSGISEALRAGAGSGTGYNKEFLLYLAGFVDGDGSICASIRPCQVAKFKHALELRFTVGQSTRRRWFLDKLVDEIGVGYVYDLGKISQYNLSQIKPLHNFLTQLQPFLKLKQKQANLVLKIIEQLPSAKESPDKFLEVCTWVDQIAALNDSRTRKTTSETVRAVLDSLSEKKKSSP

SEQ ID NO: 346 - protein, 354 aa, Artificial Sequence
  Synthesized
MNTKYNKEFLLYLAGFVDGDGSIYATIAPKQQLKFKHQLQLVFVVAQKTKRRWFLDKLVDEIGVGYVHDYGSVSYYRLSEIKPLHNFLTQLQPFLKLKQKQANLVLKIIEQLPSAKESPDKFLEVCTWVDQIAALNDSRTRKTTSETVRAVLDSLPGSVGGLSPSQASSAASSASSSPGSGISEALRAGAGSGTGYNKEFLLYLAGFVDADGSICASIRPCQVAKFKHALELRFTVGQSTKRRWFLDKLVDEIGVGYVYDLGAISQYNLSQIKPLHNFLTQLQPFLKLKQKQANLVLKIIEQLPSAKESPDKFLEVCTWVDQIAALNDSRTRKTTSETVRAVLDSLSEKKKSSP

SEQ ID NO: 347 - protein, 354 aa, Artificial Sequence
  Synthesized
MNTKYNKEFLLYLAGFVDADGSIYATIAPKQQLKFKHQLQLVFVVAQKTKRRWFLDKLVDEIGVGYVHDYNRVAYYRLSQIKPLHNFLTQLQPFLKLKQKQANLVLKIIEQLPSAKESPDKFLEVCTWVDQIAALNDSRTRKTTSETVRAVLDSLPGSVGGLSPSQASSAASSASSSPGSGISEALRAGAGSGTGYNKEFLLYLAGFVDGDGSICASIRPCQVAKFKHALELRFTVGQATKRRWFLDKLVDEIGVGYVYDLGKIAQYNLSQIKPLHNFLTQLQPFLKLKQKQANLVLKIIEQLPSAKESPDKFLEVCTWVDQIAALNDSRTRKTTSETVRAVLDSLSEKKKSSP

SEQ ID NO: 348 - protein, 354 aa, Artificial Sequence
  Synthesized
MNTKYNKEFLLYLAGFVDSDGSIYATIAPKQQLKFKHQLQLVFVVAQRTRRRWFLDKLVDEIGVGYVHDYSDVSYYRLSQIKPLHNFLTQLQPFLKLKQKQANLVLKIIEQLPSAKESPDKFLEVCTWVDQIAALNDSRTRKTTSETVRAVLDSLPGSVGGLSPSQASSAASSASSSPGSGISEALRAGAGSGTGYNKEFLLYLAGFVDGDGSICASIRPCQVAKFKHALELRFTVGQSTRRRWFLDKLVDEIGVGHVYDLGSIAQYNLSQIKPLHNFLTQLQPFLKLKQKQANLVLKIIEQLPSAKESPDKFLEVCTWVDQIAALNDSRTRKTTSETVRAVLDSLSEKKKSSP

SEQ ID NO: 349 - protein, 354 aa, Artificial Sequence
  Synthesized
MNTKYNKEFLLYLAGFVDGDGSIYATIAPKQQLKFKHQLQLVFVVAQKTRRRWFLDKLVDEIGVGYVHDYGTVSYYRLSQIKPLHNFLTQLQPFLKLKQKQANLVLKIIEQLPSAKESPDKFLEVCTWVDQIAALNDSRTRKTTSETVRAVLDSLPGSVGGLSPSQASSAASSASSSPGSGISEALRAGAGSGTGYNKEFLLYLAGFVDADGSICASIRPCQVAKFKHALELRFTVGQSTTRRWFLDKLVDEIGVGYVYDLGRVAQYNLSQIKPLHNFLTQLQPFLKLKQKQANLVLKIIEQLPSAKESPDKFLEVCTWVDQIAALNDSRTRKTTSETVRAVLDSLSEKKKSSP

SEQ ID NO: 350 - protein, 354 aa, Artificial Sequence
  Synthesized
MNTKYNKEFLLYLAGFVDADGSIYATIAPKQQLKFKHQLQLVFVVAQKTVRRWFLDKLVDEIGVGYVHDYRRVSYYRLSQIKPLHNFLTQLQPFLKLKQKQANLVLKIIEQLPSAKESPDKFLEVCTWVDQIAALNDSRTRKTTSETVRAVLDSLPGSVGGLSPSQASSAASSASSSPGSGISEALRAGAGSGTGYNKEFLLYLAGFVDGDGSICASIRPCQVAKFKHALELRFTVGQATKRRWFLDKLVDEIGVGYVYDLGRISQYNLSQIKPLHNFLTQLQPFLKLKQKQANLVLKIIEQLPSAKESPDKFLEVCTWVDQIAALNDSRTRKTTSETVRAVLDSLSEKKKSSP

SEQ ID NO: 351 - protein, 354 aa, Artificial Sequence
  Synthesized
MNTKYNKEFLLYLAGFVDGDGSIYATIAPKQQLKFKHQLQLVFVVAQKTRRRWFLDKLVDEIGVGYVHDYAQVAYYRLSEIKPLHNFLTQLQPFLKLKQKQANLVLKIIEQLPSAKESPDKFLEVCTWVDQIAALNDSRTRKTTSETVRAVLDSLPGSVGGLSPSQASSAASSASSSPGSGISEALRAGAGSGTGYNKEFLLYLAGFVDADGSICASIRPCQVAKFKHALELRFTVGQSTKRRWFLDKLVDEIGVGYVYDLGRISQYNLSQIKPLHNFLTQLQPFLKLKQKQANLVLKIIEQLPSAKESPDKFLEVCTWVDQIAALNDSRTRKTTSETVRAVLDSLSEKKKSSP

SEQ ID NO: 352 - protein, 354 aa, Artificial Sequence
  Synthesized
MNTKYNKEFLLYLAGFVDADGSIYATIAPKQQLKFKHQLQLVFVVAQKTKRRWFLDKLVDEIGVGYVHDYGTVSYYRLSEIKPLHNFLTQLQPFLKLKQKQANLVLKIIEQLPSAKESPDKFLEVCTWVDQIAALNDSRTRKTTSETVRAVLDSLPGSVGGLSPSQASSAASSASSSPGSGISEALRAGAGSGTGYNKEFLLYLAGFVDGDGSICASIRPCQVAKFKHALELRFTVGQKTERRWFLDKLVDEIGVGYVYDLGQIAQYNLSQIKPLHNFLTQLQPFLKLKQKQANLVLKIIEQLPSAKESPDKFLEVCTWVDQIAALNDSRTRKTTSETVRAVLDSLSEKKKSSP

SEQ ID NO: 353 - protein, 354 aa, Artificial Sequence
  Synthesized
MNTKYNKEFLLYLAGFVDGDGSIYATIAPKQQLKFKHQLQLVFVVAQKTRRRWFLDKLVDEIGVGYVHDYNKVSYYRLSEIKPLHNFLTQLQPFLKLKQKQANLVLKIIEQLPSAKESPDKFLEVCTWVDQIAALNDSRTRKTTSETVRAVLDSLPGSVGGLSPSQASSAASSASSSPGSGISEALRAGAGSGTGYNKEFLLYLAGFVDSDGSICASIRPCQVAKFKHALELRFTVGQSTKRRWFLDKLVDEIGVGYVYDLGSIAQYNLSQIKPLHNFLTQLQPFLKLKQKQANLVLKIIEQLPSAKESPDKFLEVCTWVDQIAALNDSRTRKTTSETVRAVLDSLSEKKKSSP

SEQ ID NO: 354 - protein, 354 aa, Artificial Sequence
  Synthesized
MNTKYNKEFLLYLAGFVDSDGSIYATIAPKQQLKFKHQLQLVFVVAQSTRRRWFLDKLVDEIGVGYVHDYGAVSYYRLSQIKPLHNFLTQLQPFLKLKQKQANLVLKIIEQLPSAKESPDKFLEVCTWVDQIAALNDSKTRKTTSETVRAVLDSLPGSVGGLSPSQASSAASSASSSPGSGISEALRAGAGSGTGYNKEFLLYLAGFVDGDGSICASIRPCQVAKFKHALELRFTVGQATRRRWFLDKLVDEIGVGYVYDLGTIAQYNLSQIKPLHNFLTQLQPFLKLKQKQANLVLKIIEQLPSAKESPDKFLEVCTWVDQIAALNDSRTRKTTSETVRAVLDSLSEKKKSSP

SEQ ID NO: 355 - protein, 354 aa, Artificial Sequence; identical to SEQ ID NO: 345
  Synthesized

SEQ ID NO: 356 - protein, 354 aa, Artificial Sequence; identical to SEQ ID NO: 343
  Synthesized

SEQ ID NO: 357 - protein, 354 aa, Artificial Sequence
  Synthesized
MNTKYNKEFLLYLAGFVDGDGSIYATIAPKQQLKFKHQLQLVFVVAQKTSRRWFLDKLVDEIGVGYVHDYGSVSYYRLSQIKPLHNFLTQLQPFLKLKQKQANLVLKIIEQLPSAKESPDKFLEVCTWVDQIAALNDSRTRKTTSETVRAVLDSLPGSVGGLSPSQASSAASSASSSPGSGISEALRAGAGSGTGYNKEFLLYLAGFVDADGSICASIRPCQVAKFKHALELRFTVGQTTKRRWFLDKLVDEIGVGYVYDLGRVAQYNLSQIKPLHNFLTQLQPFLKLKQKQANLVLKIIEQLPSAKESPDKFLEVCTWVDQIAALNDSRTRKTTSETVRAVLDSLSEKKKSSP

SEQ ID NO: 358 - DNA, 22 bp, Artificial Sequence
  Synthesized
gtatagcatgtaatatacgaag

SEQ ID NO: 359 - DNA, 22 bp, Artificial Sequence
  Synthesized
catatcgtacattatatgcttc

SEQ ID NO: 360 - protein, 354 aa, Artificial Sequence
  Synthesized
MNTKYNKEFLLYLAGFVDADGSIYATIAPKQQLKFKHQLQLVFVVAQKTRRRWFLDKLVDEIGVGYVHDYSQVTYYRLSQIKPLHNFLTQLQPFLKLKQKQANLVLKIIEQLPSAKESPDKFLEVCTWVDQIAALNDSRTRKTTSETVRAVLDSLPGSVGGLSPSQASSAASSASSSPGSGISEALRAGAGSGTGYNKEFLLYLAGFVDGDGSICASIRPCQVAKFKHALELRFTVGQKTQRRWFLDKLVDEIGVGYVYDLGSVSQYTLSQIKPLHNFLTQLQPFLKLKQKQANLVLKIIEQLPSAKESPDKFLEVCTWVDQIAALNDSKTRKTTSETVRAVLDSLSEKKKSSP

SEQ ID NO: 361 - protein, 354 aa, Artificial Sequence
  Synthesized
MNTKYNKEFLLYLAGFVDADGSIYATIAPKQQLKFKHQLQLVFVVAQATRRRWFLDKLVDEIGVGYVHDYTNVSYYRLSQIKPLHNFLTQLQPFLKLKQKQANLVLKIIEQLPSAKESPDKFLEVCTWVDQIAALNDSRTRKTTSETVRAVLDSLPGSVGGLSPSQASSAASSASSSPGSGISEALRAGAGSGTGYNKEFLLYLAGFVDGDGSICASIRPCQVAKFKHALELRFTVGQKTQRRWFLDKLVDEIGVGYVYDLGSVSQYTLSQIKPLHNFLTQLQPFLKLKQKQANLVLKIIEQLPSAKESPDKFLEVCTWVDQIAALNDSKTRKTTSETVRAVLDSLSEKKKSSP

SEQ ID NO: 362 - protein, 354 aa, Artificial Sequence
  Synthesized
MNTKYNKEFLLYLAGFVDSDGSIYATIAPKQQLKFKHQLQLVFVVAQKTARRWFLDKLVDEIGVGYVHDYASVSYYRLSQIKPLHNFLTQLQPFLKLKQKQANLVLKIIEQLPSAKESPDKFLEVCTWVDQIAALNDSRTRKTTSETVRAVLDSLPGSVGGLSPSQASSAASSASSSPGSGISEALRAGAGSGTGYNKEFLLYLAGFVDGDGSICASIRPCQVAKFKHALELRFTVGQKTQRRWFLDKLVDEIGVGYVYDLGSVSQYTLSQIKPLHNFLTQLQPFLKLKQKQANLVLKIIEQLPSAKESPDKFLEVCTWVDQIAALNDSKTRKTTSETVRAVLDSLSEKKKSSP

SEQ ID NO: 363 - protein, 354 aa, Artificial Sequence
  Synthesized
MNTKYNKEFLLYLAGFVDSDGSIYATIAPKQQLKFKHQLQLVFVVAQRTRRRWFLDKLVDEIGVGYVHDYRSVSYYRLSEIKPLHNFLTQLQPFLKLKQKQANLVLKIIEQLPSAKESPDKFLEVCTWVDQIAALNDSRTRKTTSETVRAVLDSLPGSVGGLSPSQASSAASSASSSPGSGISEALRAGAGSGTGYNKEFLLYLAGFVDGDGSICASIRPCQVAKFKHALELRFTVGQKTQRRWFLDKLVDEIGVGYVYDLGSVSQYTLSQIKPLHNFLTQLQPFLKLKQKQANLVLKIIEQLPSAKESPDKFLEVCTWVDQIAALNDSKTRKTTSETVRAVLDSLSEKKKSSP

SEQ ID NO: 364 - protein, 354 aa, Artificial Sequence
  Synthesized
MNTKYNKEFLLYLAGFVDSDGSIYATIAPKQQLKFKHQLQLVFVVAQATRRRWFLDKLVDEIGVGYVHDYAKVSYYRLSQIKPLHNFLTQLQPFLKLKQKQANLVLKIIEQLPSAKESPDKFLEVCTWVDQIAALNDSRTRKTTSETVRAVLDSLPGSVGGLSPSQASSAASSASSSPGSGISEALRAGAGSGTGYNKEFLLYLAGFVDGDGSICASIRPCQVAKFKHALELRFTVGQKTQRRWFLDKLVDEIGVGYVYDLGSVSQYTLSQIKPLHNFLTQLQPFLKLKQKQANLVLKIIEQLPSAKESPDKFLEVCTWVDQIAALNDSKTRKTTSETVRAVLDSLSEKKKSSP

SEQ ID NO: 365 - protein, 354 aa, Artificial Sequence
  Synthesized
MNTKYNKEFLLYLAGFVDADGSIYATIAPKQQLKFKHQLQLVFVVAQRTRRRWFLDKLVDEIGVGYVHDYNAVSYYRLSQIKPLHNFLTQLQPFLKLKQKQANLVLKIIEQLPSAKESPDKFLEVCTWVDQIAALNDSRTRKTTSETVRAVLDSLPGSVGGLSPSQASSAASSASSSPGSGISEALRAGAGSGTGYNKEFLLYLAGFVDGDGSICASIRPCQVAKFKHALELRFTVGQKTQRRWFLDKLVDEIGVGYVYDLGSVSQYTLSQIKPLHNFLTQLQPFLKLKQKQANLVLKIIEQLPSAKESPDKFLEVCTWVDQIAALNDSKTRKTTSETVRAVLDSLSEKKKSSP

SEQ ID NO: 366 - protein, 354 aa, Artificial Sequence
  Synthesized
MNTKYNKEFLLYLAGFVDSDGSIYATIAPKQQLKFKHQLQLVFVVAQSTRRRWFLDKLVDEIGVGYVHDYSHCSYYRLSQIKPLHNFLTQLQPFLKLKQKQANLVLKIIEQLPSAKESPDKFLEVCTWVDQIAALNDSRTRKTTSETVRAVLDSLPGSVGGLSPSQASSAASSASSSPGSGISEALRAGAGSGTGYNKEFLLYLAGFVDGDGSICASIRPCQVAKFKHALELRFTVGQKTQRRWFLDKLVDEIGVGYVYDLGSVSQYTLSQIKPLHNFLTQLQPFLKLKQKQANLVLKIIEQLPSAKESPDKFLEVCTWVDQIAALNDSKTRKTTSETVRAVLDSLSEKKKSSP

SEQ ID NO: 367 - protein, 354 aa, Artificial Sequence
  Synthesized
MNTKYNKEFLLYLAGFVDSDGSIYATIAPKQQLKFKHQLQLVFVVAQSTRRRWFLDKLVDEIGVGYVHDYAHVSYYRLSQIKPLHNFLTQLQPFLKLKQKQANLVLKIIEQLPSAKESPDKFLEVCTWVDQIAALNDSRTRKTTSETVRAVLDSLPGSVGGLSPSQASSAASSASSSPGSGISEALRAGAGSGTGYNKEFLLYLAGFVDGDGSICASIRPCQVAKFKHALELRFTVGQKTQRRWFLDKLVDEIGVGYVYDLGSVSQYTLSQIKPLHNFLTQLQPFLKLKQKQANLVLKIIEQLPSAKESPDKFLEVCTWVDQIAALNDSKTRKTTSETVRAVLDSLSEKKKSSP

SEQ ID NO: 368 - protein, 354 aa, Artificial Sequence
  Synthesized
MNTKYNKEFLLYLAGFVDSDGSIYATIAPKQQLKFKHQLQLVFVVAQRTKRRWFLDKLVDEIGVGYVHDYTGVAYYRLSQIKPLHNFLTQLQPFLKLKQKQANLVLKIIEQLPSAKESPDKFLEVCTWVDQIAALNDSRTRKTTSETVRAVLDSLPGSVGGLSPSQASSAASSASSSPGSGISEALRAGAGSGTGYNKEFLLYLAGFVDGDGSICASIRPCQVAKFKHALELRFTVGQKTQRRWFLDKLVDEIGVGYVYDLGSVSQYTLSQIKPLHNFLTQLQPFLKLKQKQANLVLKIIEQLPSAKESPDKFLEVCTWVDQIAALNDSKTRKTTSETVRAVLDSLSEKKKSSP

SEQ ID NO: 369 - protein, 354 aa, Artificial Sequence
  Synthesized
MNTKYNKEFLLYLAGFVDSDGSIYATIAPKQQLKFKHQLQLVFVVAQATRRRWFLDKLVDEIGVGYVHDYHSVSYYRLSEIKPLHNFLTQLQPFLKLKQKQANLVLKIIEQLPSAKESPDKFLEVCTWVDQIAALNDSRTRKTTSETVRAVLDSLPGSVGGLSPSQASSAASSASSSPGSGISEALRAGAGSGTGYNKEFLLYLAGFVDGDGSICASIRPCQVAKFKHALELRFTVGQKTQRRWFLDKLVDEIGVGYVYDLGSVSQYTLSQIKPLHNFLTQLQPFLKLKQKQANLVLKIIEQLPSAKESPDKFLEVCTWVDQIAALNDSKTRKTTSETVRAVLDSLSEKKKSSP

SEQ ID NO: 370 - protein, 354 aa, Artificial Sequence
  Synthesized
MNTKYNKEFLLYLAGFVDSDGSIYATIAPKQQLKFKHQLQLVFVVAQNTRRRWFLDKLVDEIGVGYVHDYKRVSYYRLSQIKPLHNFLTQLQPFLKLKQKQANLVLKIIEQLPSAKESPDKFLEVCTWVDQIAALNDSRTRKTTSETVRAVLDSLPGSVGGLSPSQASSAASSASSSPGSGISEALRAGAGSGTGYNKEFLLYLAGFVDGDGSICASIRPCQVAKFKHALELRFTVGQKTQRRWFLDKLVDEIGVGYVYDLGSVSQYTLSQIKPLHNFLTQLQPFLKLKQKQANLVLKIIEQLPSAKESPDKFLEVCTWVDQIAALNDSKTRKTTSETVRAVLDSLSEKKKSSP

SEQ ID NO: 371 - protein, 354 aa, Artificial Sequence
  Synthesized
MNTKYNKEFLLYLAGFVDSDGSIYATIAPKQQLKFKHQLQLVFVVAQRTRRRWFLDKLVDEIGVGYVHDYRAVSYYRLSEIKPLHNFLTQLQPFLKLKQKQANLVLKIIEQLPSAKESPDKFLEVCTWVDQIAALNDSKTRKTTSETVRAVLDSLPGSVGGLSPSQASSAASSASSSPGSGISEALRAGAGSGTGYNKEFLLYLAGFVDGDGSICASIRPCQVAKFKHALELRFTVGQKTQRRWFLDKLVDEIGVGYVYDLGSVSQYTLSQIKPLHNFLTQLQPFLKLKQKQANLVLKIIEQLPSAKESPDKFLEVCTWVDQIAALNDSKTRKTTSETVRAVLDSLSEKKKSSP

SEQ ID NO: 372 - protein, 354 aa, Artificial Sequence
  Synthesized
MNTKYNKEFLLYLAGFVDSDGSIYATIAPKQQLKFKHQLQLVFVVAQKTARRWFLDKLVDEIGVGYVHDYNRVSYYRLSQIKPLHNFLTQLQPFLKLKQKQANLVLKIIEQLPSAKESPDKFLEVCTWVDQIAALNDSRTRKTTSETVRAVLDSLPGSVGGLSPSQASSAASSASSSPGSGISEALRAGAGSGTGYNKEFLLYLAGFVDGDGSICASIRPCQVAKFKHALELRFTVGQKTQRRWFLDKLVDEIGVGYVYDLGSVSQYTLSQIKPLHNFLTQLQPFLKLKQKQANLVLKIIEQLPSAKESPDKFLEVCTWVDQIAALNDSKTRKTTSETVRAVLDSLSEKKKSSP

SEQ ID NO: 373 - protein, 354 aa, Artificial Sequence
  Synthesized
MNTKYNKEFLLYLAGFVDADGSIYATIAPKQQLKFKHQLQLVFVVAQSTKRRWFLDKLVDEIGVGYVHDYHSVSYYRLSQIKPLHNFLTQLQPFLKLKQKQANLVLKIIEQLPSAKESPDKFLEVCTWVDQIAALNDSRTRKTTSETVRAVLDSLPGSVGGLSPSQASSAASSASSSPGSGISEALRAGAGSGTGYNKEFLLYLAGFVDGDGSICASIRPCQVAKFKHALELRFTVGQKTQRRWFLDKLVDEIGVGYVYDLGSVSQYTLSQIKPLHNFLTQLQPFLKLKQKQANLVLKIIEQLPSAKESPDKFLEVCTWVDQIAALNDSKTRKTTSETVRAVLDSLSEKKKSSP

SEQ ID NO: 374 - protein, 354 aa, Artificial Sequence
  Synthesized
MNTKYNKEFLLYLAGFVDADGSIYATIAPKQQLKFKHQLQLVFVVAQSTARRWFLDKLVDEIGVGYVHDYGTVSYYRLSQIKPLHNFLTQLQPFLKLKQKQANLVLKIIEQLPSAKESPDKFLEVCTWVDQIAALNDSKTRKTTSETVRAVLDSLPGSVGGLSPSQASSAASSASSSPGSGISEALRAGAGSGTGYNKEFLLYLAGFVDGDGSICASIRPCQVAKFKHALELRFTVGQKTQRRWFLDKLVDEIGVGYVYDLGSVSQYTLSQIKPLHNFLTQLQPFLKLKQKQANLVLKIIEQLPSAKESPDKFLEVCTWVDQIAALNDSKTRKTTSETVRAVLDSLSEKKKSSP

SEQ ID NO: 375 - protein, 354 aa, Artificial Sequence; identical to SEQ ID NO: 367
  Synthesized

SEQ ID NO: 376 - protein, 354 aa, Artificial Sequence
  Synthesized
MNTKYNKEFLLYLAGFVDSDGSIYATIAPKQQLKFKHQLQLVFVVAQSTRRRWFLDKLVDEIGVGYVHDYSTVSYYRLSEIKPLHNFLTQLQPFLKLKQKQANLVLKIIEQLPSAKESPDKFLEVCTWVDQIAALNDSRTRKTTSETVRAVLDSLPGSVGGLSPSQASSAASSASSSPGSGISEALRAGAGSGTGYNKEFLLYLAGFVDGDGSICASIRPCQVAKFKHALELRFTVGQKTQRRWFLDKLVDEIGVGYVYDLGSVSQYTLSQIKPLHNFLTQLQPFLKLKQKQANLVLKIIEQLPSAKESPDKFLEVCTWVDQIAALNDSKTRKTTSETVRAVLDSLSEKKKSSP

SEQ ID NO: 377 - protein, 354 aa, Artificial Sequence
  Synthesized
MNTKYNKEFLLYLAGFVDSDGSIYATIAPKQQLKFKHQLQLVFVVAQSTRRRWFLDKLVDEIGVGYVHDYSDVSYYRLSQIKPLHNFLTQLQPFLKLKQKQANLVLKIIEQLPSAKESPDKFLEVCTWVDQIAALNDSRTRKTTSETVRAVLDSLPGSVGGLSPSQASSAASSASSSPGSGISEALRAGAGSGTGYNKEFLLYLAGFVDGDGSICASIRPCQVAKFKHALELRFTVGQKTQRRWFLDKLVDEIGVGYVYDLGSVSQYTLSQIKPLHNFLTQLQPFLKLKQKQANLVLKIIEQLPSAKESPDKFLEVCTWVDQIAALNDSKTRKTTSETVRAVLDSLSEKKKSSP

SEQ ID NO: 378 - protein, 354 aa, Artificial Sequence
  Synthesized
MNTKYNKEFLLYLAGFVDSDGSIYATIAPKQQLKFKHQLQLVFVVAQATRRRWFLDKLVDEIGVGYVHDYSGVAYYRLSQIKPLHNFLTQLQPFLKLKQKQANLVLKIIEQLPSAKESPDKFLEVCTWVDQIAALNDSRTRKTTSETVRAVLDSLPGSVGGLSPSQASSAASSASSSPGSGISEALRAGAGSGTGYNKEFLLYLAGFVDGDGSICASIRPCQVAKFKHALELRFTVGQKTQRRWFLDKLVDEIGVGYVYDLGSVSQYTLSQIKPLHNFLTQLQPFLKLKQKQANLVLKIIEQLPSAKESPDKFLEVCTWVDQIAALNDSKTRKTTSETVRAVLDSLSEKKKSSP

SEQ ID NO: 379 - protein, 354 aa, Artificial Sequence
  Synthesized
MNTKYNKEFLLYLAGFVDSDGSIYATIAPKQQLKFKHQLQLVFVVAQATRRRWFLDKLVDEIGVGYVHDYSSVSYYRLSQIKPLHNFLTQLQPFLKLKQKQANLVLKIIEQLPSAKESPDKFLEVCTWVDQIAALNDSRTRKTTSETVRAVLDSLPGSVGGLSPSQASSAASSASSSPGSGISEALRAGAGSGTGYNKEFLLYLAGFVDGDGSICASIRPCQVAKFKHALELRFTVGQKTQRRWFLDKLVDEIGVGYVYDLGSVSQYTLSQIKPLHNFLTQLQPFLKLKQKQANLVLKIIEQLPSAKESPDKFLEVCTWVDQIAALNDSKTRKTTSETVRAVLDSLSEKKKSSP

SEQ ID NO: 380 - protein, 354 aa, Artificial Sequence
  Synthesized
MNTKYNKEFLLYLAGFVDADGSIYATIAPKQQLKFKHQLQLVFVVAQKTCRRWFLDKLVDEIGVGYVHDYRTVAYYRLSQIKPLHNFLTQLQPFLKLKQKQANLVLKIIEQLPSAKESPDKFLEVCTWVDQIAALNDSRTRKTTSETVRAVLDSLPGSVGGLSPSQASSAASSASSSPGSGISEALRAGAGSGTGYNKEFLLYLAGFVDGDGSICASIRPCQVAKFKHALELRFTVGQKTQRRWFLDKLVDEIGVGYVYDLGSVSQYTLSQIKPLHNFLTQLQPFLKLKQKQANLVLKIIEQLPSAKESPDKFLEVCTWVDQIAALNDSKTRKTTSETVRAVLDSLSEKKKSSP

SEQ ID NO: 381 - protein, 354 aa, Artificial Sequence
  Synthesized
MNTKYNKEFLLYLAGFVDSDGSIYATIAPKQQLKFKHQLQLVFVVAQNTRRRWFLDKLVDEIGVGYVHDYGRVSYYRLSQIKPLHNFLTQLQPFLKLKQKQANLVLKIIEQLPSAKESPDKFLEVCTWVDQIAALNDSRTRKTTSETVRAVLDSLPGSVGGLSPSQASSAASSASSSPGSGISEALRAGAGSGTGYNKEFLLYLAGFVDGDGSICASIRPCQVAKFKHALELRFTVGQKTQRRWFLDKLVDEIGVGYVYDLGSVSQYTLSQIKPLHNFLTQLQPFLKLKQKQANLVLKIIEQLPSAKESPDKFLEVCTWVDQIAALNDSKTRKTTSETVRAVLDSLSEKKKSSP

SEQ ID NO: 382 - protein, 354 aa, Artificial Sequence
  Synthesized
MNTKYNKEFLLYLAGFVDSDGSIYATIAPKQQLKFKHQLQLVFVVAQATRRRWFLDKLVDEIGVGYVHDYRNVAYYRLSQIKPLHNFLTQLQPFLKLKQKQANLVLKIIEQLPSAKESPDKFLEVCTWVDQIAALNDSRTRKTTSETVRAVLDSLPGSVGGLSPSQASSAASSASSSPGSGISEALRAGAGSGTGYNKEFLLYLAGFVDGDGSICASIRPCQVAKFKHALELRFTVGQKTQRRWFLDKLVDEIGVGYVYDLGSVSQYTLSQIKPLHNFLTQLQPFLKLKQKQANLVLKIIEQLPSAKESPDKFLEVCTWVDQIAALNDSKTRKTTSETVRAVLDSLSEKKKSSP

SEQ ID NO: 383 - protein, 354 aa, Artificial Sequence
  Synthesized
MNTKYNKEFLLYLAGFVDSDGSIYATIAPKQQLKFKHQLQLVFVVAQTTRRRWFLDKLVDEIGVGYVHDYGTVSYYRLSQIKPLHNFLTQLQPFLKLKQKQANLVLKIIEQLPSAKESPDKFLEVCTWVDQIAALNDSRTRKTTSETVRAVLDSLPGSVGGLSPSQASSAASSASSSPGSGISEALRAGAGSGTGYNKEFLLYLAGFVDGDGSICASIRPCQVAKFKHALELRFTVGQKTQRRWFLDKLVDEIGVGYVYDLGSVSQYTLSQIKPLHNFLTQLQPFLKLKQKQANLVLKIIEQLPSAKESPDKFLEVCTWVDQIAALNDSKTRKTTSETVRAVLDSLSEKKKSSP

SEQ ID NO: 384 - protein, 354 aa, Artificial Sequence
  Synthesized
MNTKYNKEFLLYLAGFVDADGSIYATIAPKQQLKFKHQLQLVFVVAQSTRRRWFLDKLVDEIGVGYVHDYRSVAYYRLSEIKPLHNFLTQLQPFLKLKQKQANLVLKIIEQLPSAKESPDKFLEVCTWVDQIAALNDSRTRKTTSETVRAVLDSLPGSVGGLSPSQASSAASSASSSPGSGISEALRAGAGSGTGYNKEFLLYLAGFVDGDGSICASIRPCQVAKFKHALELRFTVGQKTQRRWFLDKLVDEIGVGYVYDLGSVSQYTLSQIKPLHNFLTQLQPFLKLKQKQANLVLKIIEQLPSAKESPDKFLEVCTWVDQIAALNDSKTRKTTSETVRAVLDSLSEKKKSSP

SEQ ID NO: 385 - protein, 354 aa, Artificial Sequence
  Synthesized
MNTKYNKEFLLYLAGFVDSDGSIYATIAPKQQLKFKHQLQLVFVVAQATRRRWFLDKLVDEIGVGYVHDYRHVSYYRLSQIKPLHNFLTQLQPFLKLKQKQANLVLKIIEQLPSAKESPDKFLEVCTWVDQIAALNDSRTRKTTSETVRAVLDSLPGSVGGLSPSQASSAASSASSSPGSGISEALRAGAGSGTGYNKEFLLYLAGFVDGDGSICASIRPCQVAKFKHALELRFTVGQKTQRRWFLDKLVDEIGVGYVYDLGSVSQYTLSQIKPLHNFLTQLQPFLKLKQKQANLVLKIIEQLPSAKESPDKFLEVCTWVDQIAALNDSKTRKTTSETVRAVLDSLSEKKKSSP

SEQ ID NO: 386 - protein, 354 aa, Artificial Sequence
  Synthesized
MNTKYNKEFLLYLAGFVDSDGSIYATIAPKQQLKFKHQLQLVFVVAQSTRRRWFLDKLVDEIGVGYVHDYNYISYYRLSQIKPLHNFLTQLQPFLKLKQKQANLVLKIIEQLPSAKESPDKFLEVCTWVDQIAALNDSRTRKTTSETVRAVLDSLPGSVGGLSPSQASSAASSASSSPGSGISEALRAGAGSGTGYNKEFLLYLAGFVDGDGSICASIRPCQVAKFKHALELRFTVGQKTQRRWFLDKLVDEIGVGYVYDLGSVSQYTLSQIKPLHNFLTQLQPFLKLKQKQANLVLKIIEQLPSAKESPDKFLEVCTWVDQIAALNDSKTRKTTSETVRAVLDSLSEKKKSSP

SEQ ID NO: 387 - protein, 354 aa, Artificial Sequence
  Synthesized
MNTKYNKEFLLYLAGFVDADGSIYATIAPKQQLKFKHQLQLVFVVAQRTRRRWFLDKLVDEIGVGYVHDYATCSYYRLSEIKPLHNFLTQLQPFLKLKQKQANLVLKIIEQLPSAKESPDKFLEVCTWVDQIAALNDSKTRKTTSETVRAVLDSLPGSVGGLSPSQASSAASSASSSPGSGISEALRAGAGSGTGYNKEFLLYLAGFVDGDGSICASIRPCQVAKFKHALELRFTVGQKTQRRWFLDKLVDEIGVGYVYDLGSVSQYTLSQIKPLHNFLTQLQPFLKLKQKQANLVLKIIEQLPSAKESPDKFLEVCTWVDQIAALNDSKTRKTTSETVRAVLDSLSEKKKSSP

SEQ ID NO: 388 - protein, 354 aa, Artificial Sequence
  Synthesized
MNTKYNKEFLLYLAGFVDSDGSIYATIAPKQQLKFKHQLQLVFVVAQRTCRRWFLDKLVDEIGVGYVHDYSNVSYYRLSQIKPLHNFLTQLQPFLKLKQKQANLVLKIIEQLPSAKESPDKFLEVCTWVDQIAALNDSRTRKTTSETVRAVLDSLPGSVGGLSPSQASSAASSASSSPGSGISEALRAGAGSGTGYNKEFLLYLAGFVDGDGSICASIRPCQVAKFKHALELRFTVGQKTQRRWFLDKLVDEIGVGYVYDLGSVSQYTLSQIKPLHNFLTQLQPFLKLKQKQANLVLKIIEQLPSAKESPDKFLEVCTWVDQIAALNDSKTRKTTSETVRAVLDSLSEKKKSSP

SEQ ID NO: 389 - protein, 354 aa, Artificial Sequence
  Synthesized
MNTKYNKEFLLYLAGFVDADGSIYATIAPKQQLKFKHQLQLVFVVAQKTRRRWFLDKLVDEIGVGYVHDYHPTSYYRLSQIKPLHNFLTQLQPFLKLKQKQANLVLKIIEQLPSAKESPDKFLEVCTWVDQIAALNDSRTRKTTSETVRAVLDSLPGSVGGLSPSQASSAASSASSSPGSGISEALRAGAGSGTGYNKEFLLYLAGFVDGDGSICASIRPCQVAKFKHALELRFTVGQKTQRRWFLDKLVDEIGVGYVYDLGSVSQYTLSQIKPLHNFLTQLQPFLKLKQKQANLVLKIIEQLPSAKESPDKFLEVCTWVDQIAALNDSKTRKTTSETVRAVLDSLSEKKKSSP

SEQ ID NO: 390 - DNA, 22 bp, Artificial Sequence
  Synthesized
gtatagcatgtagtatacgaag

SEQ ID NO: 391 - DNA, 22 bp, Artificial Sequence
  Synthesized
catatcgtacatcatatgcttc

SEQ ID NO: 392 - protein, 354 aa, Artificial Sequence
  Synthesized
MNTKYNKEFLLYLAGFVDADGSIYATIAPKQQLKFKHQLQLVFVVAQKTRRRWFLDKLVDEIGVGYVHDYSNRSYYRLSQIKPLHNFLTQLQPFLKLKQKQANLVLKIIEQLPSAKESPDKFLEVCTWVDQIAALNDSKTRKTTSETVRAVLDSLPGSVGGLSPSQASSAASSASSSPGSGISEALRAGAGSGTGYNKEFLLYLAGFVDGDGSICASIRPCQVAKFKHALELRFTVGQKTQRRWFLDKLVDEIGVGYVYDLGSVSQYTLSQIKPLHNFLTQLQPFLKLKQKQANLVLKIIEQLPSAKESPDKFLEVCTWVDQIAALNDSKTRKTTSETVRAVLDSLSEKKKSSP

SEQ ID NO: 393 - protein, 354 aa, Artificial Sequence
  Synthesized
MNTKYNKEFLLYLAGFVDSDGSIYATIAPKQQLKFKHQLQLVFVVAQKTRRRWFLDKLVDEIGVGYVHDYDGRSYYRLSQIKPLHNFLTQLQPFLKLKQKQANLVLKIIEQLPSAKESPDKFLEVCTWVDQIAALNDSKTRKTTSETVRAVLDSLPGSVGGLSPSQASSAASSASSSPGSGISEALRAGAGSGTGYNKEFLLYLAGFVDGDGSICASIRPCQVAKFKHALELRFTVGQKTQRRWFLDKLVDEIGVGYVYDLGSVSQYTLSQIKPLHNFLTQLQPFLKLKQKQANLVLKIIEQLPSAKESPDKFLEVCTWVDQIAALNDSKTRKTTSETVRAVLDSLSEKKKSSP

SEQ ID NO: 394 - protein, 354 aa, Artificial Sequence
  Synthesized
MNTKYNKEFLLYLAGFVDADGSIYATIAPKQQLKFKHQLQLVFVVAQKTRRRWFLDKLVDEIGVGYVHDYSGRSYYRLSQIKPLHNFLTQLQPFLKLKQKQANLVLKIIEQLPSAKESPDKFLEVCTWVDQIAALNDSKTRKTTSETVRAVLDSLPGSVGGLSPSQASSAASSASSSPGSGISEALRAGAGSGTGYNKEFLLYLAGFVDGDGSICASIRPCQVAKFKHALELRFTVGQKTQRRWFLDKLVDEIGVGYVYDLGSVSQYTLSQIKPLHNFLTQLQPFLKLKQKQANLVLKIIEQLPSAKESPDKFLEVCTWVDQIAALNDSKTRKTTSETVRAVLDSLSEKKKSSP

SEQ ID NO: 395 - protein, 354 aa, Artificial Sequence
  Synthesized
MNTKYNKEFLLYLAGFVDSDGSIYATIAPKQQLKFKHQLQLVFVVAQKTCRRWFLDKLVDEIGVGYVHDYSNRSYYRLSQIKPLHNFLTQLQPFLKLKQKQANLVLKIIEQLPSAKESPDKFLEVCTWVDQIAALNDSRTRKTTSETVRAVLDSLPGSVGGLSPSQASSAASSASSSPGSGISEALRAGAGSGTGYNKEFLLYLAGFVDGDGSICASIRPCQVAKFKHALELRFTVGQKTQRRWFLDKLVDEIGVGYVYDLGSVSQYTLSQIKPLHNFLTQLQPFLKLKQKQANLVLKIIEQLPSAKESPDKFLEVCTWVDQIAALNDSKTRKTTSETVRAVLDSLSEKKKSSP

SEQ ID NO: 396 - protein, 354 aa, Artificial Sequence; identical to SEQ ID NO: 394
  Synthesized

SEQ ID NO: 397 - protein, 354 aa, Artificial Sequence; identical to SEQ ID NO: 392
  Synthesized

SEQ ID NO: 398 - protein, 354 aa, Artificial Sequence; identical to SEQ ID NO: 395
  Synthesized

SEQ ID NO: 399 - protein, 354 aa, Artificial Sequence; identical to SEQ ID NO: 393
  Synthesized

SEQ ID NO: 400 - DNA, 22 bp, Artificial Sequence
  Synthesized
gtatagcatgtattatacgaag

SEQ ID NO: 401 - DNA, 22 bp, Artificial Sequence
  Synthesized
catatcgtacataatatgcttc

SEQ ID NO: 402 - protein, 354 aa, Artificial Sequence
  Synthesized
MNTKYNKEFLLYLAGFVDSDGSIYATIAPKQQLKFKHQLQLVFVVAQKTVRRWFLDKLVDEIGVGYVHDYTKCSYYRLSQIKPLHNFLTQLQPFLKLKQKQANLVLKIIEQLPSAKESPDKFLEVCTWVDQIAALNDSRTRKTTSETVRAVLDSLPGSVGGLSPSQASSAASSASSSPGSGISEALRAGAGSGTGYNKEFLLYLAGFVDGDGSICASIRPCQVAKFKHALELRFTVGQKTQRRWFLDKLVDEIGVGYVYDLGSVSQYTLSQIKPLHNFLTQLQPFLKLKQKQANLVLKIIEQLPSAKESPDKFLEVCTWVDQIAALNDSKTRKTTSETVRAVLDSLSEKKKSSP

SEQ ID NO: 403 - protein, 354 aa, Artificial Sequence
  Synthesized
MNTKYNKEFLLYLAGFVDSDGSIYATIAPKQQLKFKHQLQLVFVVAQHTSRRWFLDKLVDEIGVGYVHDYGYCSYYRLSEIKPLHNFLTQLQPFLKLKQKQANLVLKIIEQLPSAKESPDKFLEVCTWVDQIAALNDSRTRKTTSETVRAVLDSLPGSVGGLSPSQASSAASSASSSPGSGISEALRAGAGSGTGYNKEFLLYLAGFVDGDGSICASIRPCQVAKFKHALELRFTVGQKTQRRWFLDKLVDEIGVGYVYDLGSVSQYTLSQIKPLHNFLTQLQPFLKLKQKQANLVLKIIEQLPSAKESPDKFLEVCTWVDQIAALNDSKTRKTTSETVRAVLDSLSEKKKSSP

SEQ ID NO: 404 - protein, 354 aa, Artificial Sequence
  Synthesized
MNTKYNKEFLLYLAGFVDSDGSIYATIAPKQQLKFKHQLQLVFVVAQKTCRRWFLDKLVDEIGVGYVHDYGWCSYYRLSQIKPLHNFLTQLQPFLKLKQKQANLVLKIIEQLPSAKESPDKFLEVCTWVDQIAALNDSRTRKTTSETVRAVLDSLPGSVGGLSPSQASSAASSASSSPGSGISEALRAGAGSGTGYNKEFLLYLAGFVDGDGSICASIRPCQVAKFKHALELRFTVGQKTQRRWFLDKLVDEIGVGYVYDLGSVSQYTLSQIKPLHNFLTQLQPFLKLKQKQANLVLKIIEQLPSAKESPDKFLEVCTWVDQIAALNDSKTRKTTSETVRAVLDSLSEKKKSSP

SEQ ID NO: 405 - protein, 354 aa, Artificial Sequence
  Synthesized
MNTKYNKEFLLYLAGFVDSDGSIYATIAPKQQLKFKHQLQLVFVVAQHTSRRWFLDKLVDEIGVGYVHDYGRASYYRLSQIKPLHNFLTQLQPFLKLKQKQANLVLKIIEQLPSAKESPDKFLEVCTWVDQIAALNDSRTRKTTSETVRAVLDSLPGSVGGLSPSQASSAASSASSSPGSGISEALRAGAGSGTGYNKEFLLYLAGFVDGDGSICASIRPCQVAKFKHALELRFTVGQKTQRRWFLDKLVDEIGVGYVYDLGSVSQYTLSQIKPLHNFLTQLQPFLKLKQKQANLVLKIIEQLPSAKESPDKFLEVCTWVDQIAALNDSKTRKTTSETVRAVLDSLSEKKKSSP

SEQ ID NO: 406 - protein, 354 aa, Artificial Sequence
  Synthesized
MNTKYNKEFLLYLAGFVDSDGSIYATIAPKQQLKFKHQLQLVFVVAQGTRRRWFLDKLVDEIGVGYVHDYGRASYYRLSQIKPLHNFLTQLQPFLKLKQKQANLVLKIIEQLPSAKESPDKFLEVCTWVDQIAALNDSKTRKTTSETVRAVLDSLPGSVGGLSPSQASSAASSASSSPGSGISEALRAGAGSGTGYNKEFLLYLAGFVDGDGSICASIRPCQVAKFKHALELRFTVGQKTQRRWFLDKLVDEIGVGYVYDLGSVSQYTLSQIKPLHNFLTQLQPFLKLKQKQANLVLKIIEQLPSAKESPDKFLEVCTWVDQIAALNDSKTRKTTSETVRAVLDSLSEKKKSSP

SEQ ID NO: 407 - protein, 354 aa, Artificial Sequence
  Synthesized
MNTKYNKEFLLYLAGFVDSDGSIYATIAPKQQLKFKHQLQLVFVVAQATRRRWFLDKLVDEIGVGYVHDYKNCCYYRLSQIKPLHNFLTQLQPFLKLKQKQANLVLKIIEQLPSAKESPDKFLEVCTWVDQIAALNDSRTRKTTSETVRAVLDSLPGSVGGLSPSQASSAASSASSSPGSGISEALRAGAGSGTGYNKEFLLYLAGFVDGDGSICASIRPCQVAKFKHALELRFTVGQKTQRRWFLDKLVDEIGVGYVYDLGSVSQYTLSQIKPLHNFLTQLQPFLKLKQKQANLVLKIIEQLPSAKESPDKFLEVCTWVDQIAALNDSKTRKTTSETVRAVLDSLSEKKKSSP

SEQ ID NO: 408 - protein, 354 aa, Artificial Sequence
  Synthesized
MNTKYNKEFLLYLAGFVDSDGSIYATIAPKQQLKFKHQLQLVFVVAQATQRRWFLDKLVDEIGVGYVHDYGRASYYRLSQIKPLHNFLTQLQPFLKLKQKQANLVLKIIEQLPSAKESPDKFLEVCTWVDQIAALNDSRTRKTTSETVRAVLDSLPGSVGGLSPSQASSAASSASSSPGSGISEALRAGAGSGTGYNKEFLLYLAGFVDGDGSICASIRPCQVAKFKHALELRFTVGQKTQRRWFLDKLVDEIGVGYVYDLGSVSQYTLSQIKPLHNFLTQLQPFLKLKQKQANLVLKIIEQLPSAKESPDKFLEVCTWVDQIAALNDSKTRKTTSETVRAVLDSLSEKKKSSP

SEQ ID NO: 409 - protein, 354 aa, Artificial Sequence
  Synthesized
MNTKYNKEFLLYLAGFVDADGSIYATIAPKQQLKFKHQLQLVFVVAQTTRRRWFLDKLVDEIGVGYVHDYGRASYYRLSEIKPLHNFLTQLQPFLKLKQKQANLVLKIIEQLPSAKESPDKFLEVCTWVDQIAALNDSKTRKTTSETVRAVLDSLPGSVGGLSPSQASSAASSASSSPGSGISEALRAGAGSGTGYNKEFLLYLAGFVDGDGSICASIRPCQVAKFKHALELRFTVGQKTQRRWFLDKLVDEIGVGYVYDLGSVSQYTLSQIKPLHNFLTQLQPFLKLKQKQANLVLKIIEQLPSAKESPDKFLEVCTWVDQIAALNDSKTRKTTSETVRAVLDSLSEKKKSSP

SEQ ID NO: 410 - protein, 354 aa, Artificial Sequence
  Synthesized
MNTKYNKEFLLYLAGFVDSDGSIYATIAPKQQLKFKHQLQLVFVVAQATRRRWFLDKLVDEIGVGYVHDYASCAYYRLSQIKPLHNFLTQLQPFLKLKQKQANLVLKIIEQLPSAKESPDKFLEVCTWVDQIAALNDSKTRKTTSETVRAVLDSLPGSVGGLSPSQASSAASSASSSPGSGISEALRAGAGSGTGYNKEFLLYLAGFVDGDGSICASIRPCQVAKFKHALELRFTVGQKTQRRWFLDKLVDEIGVGYVYDLGSVSQYTLSQIKPLHNFLTQLQPFLKLKQKQANLVLKIIEQLPSAKESPDKFLEVCTWVDQIAALNDSKTRKTTSETVRAVLDSLSEKKKSSP

SEQ ID NO: 411 - protein, 354 aa, Artificial Sequence
  Synthesized
MNTKYNKEFLLYLAGFVDSDGSIYATIAPKQQLKFKHQLQLVFVVAQKTTRRWFLDKLVDEIGVGYVHDYHTASYYRLSQIKPLHNFLTQLQPFLKLKQKQANLVLKIIEQLPSAKESPDKFLEVCTWVDQIAALNDSRTRKTTSETVRAVLDSLPGSVGGLSPSQASSAASSASSSPGSGISEALRAGAGSGTGYNKEFLLYLAGFVDGDGSICASIRPCQVAKFKHALELRFTVGQKTQRRWFLDKLVDEIGVGYVYDLGSVSQYTLSQIKPLHNFLTQLQPFLKLKQKQANLVLKIIEQLPSAKESPDKFLEVCTWVDQIAALNDSKTRKTTSETVRAVLDSLSEKKKSSP

SEQ ID NO: 412 - protein, 354 aa, Artificial Sequence
  Synthesized
MNTKYNKEFLLYLAGFVDSDGSIYATIAPKQQLKFKHQLQLVFVVAQSTRRRWFLDKLVDEIGVGYVHDYYGSSYYRLSQIKPLHNFLTQLQPFLKLKQKQANLVLKIIEQLPSAKESPDKFLEVCTWVDQIAALNDSRTRKTTSETVRAVLDSLPGSVGGLSPSQASSAASSASSSPGSGISEALRAGAGSGTGYNKEFLLYLAGFVDGDGSICASIRPCQVAKFKHALELRFTVGQKTQRRWFLDKLVDEIGVGYVYDLGSVSQYTLSQIKPLHNFLTQLQPFLKLKQKQANLVLKIIEQLPSAKESPDKFLEVCTWVDQIAALNDSKTRKTTSETVRAVLDSLSEKKKSSP

SEQ ID NO: 413 - protein, 354 aa, Artificial Sequence
  Synthesized
MNTKYNKEFLLYLAGFVDSDGSIYATIAPKQQLKFKHQLQLVFVVAQMTRRRWFLDKLVDEIGVGYVHDYGRASYYRLSQIKPLHNFLTQLQPFLKLKQKQANLVLKIIEQLPSAKESPDKFLEVCTWVDQIAALNDSRTRKTTSETVRAVLDSLPGSVGGLSPSQASSAASSASSSPGSGISEALRAGAGSGTGYNKEFLLYLAGFVDGDGSICASIRPCQVAKFKHALELRFTVGQKTQRRWFLDKLVDEIGVGYVYDLGSVSQYTLSQIKPLHNFLTQLQPFLKLKQKQANLVLKIIEQLPSAKESPDKFLEVCTWVDQIAALNDSKTRKTTSETVRAVLDSLSEKKKSSP

SEQ ID NO: 414 - protein, 354 aa, Artificial Sequence
  Synthesized
MNTKYNKEFLLYLAGFVDADGSIYATIAPKQQLKFKHQLQLVFVVAQSTGRRWFLDKLVDEIGVGYVHDYGRASYYRLSQIKPLHNFLTQLQPFLKLKQKQANLVLKIIEQLPSAKESPDKFLEVCTWVDQIAALNDSKTRKTTSETVRAVLDSLPGSVGGLSPSQASSAASSASSSPGSGISEALRAGAGSGTGYNKEFLLYLAGFVDGDGSICASIRPCQVAKFKHALELRFTVGQKTQRRWFLDKLVDEIGVGYVYDLGSVSQYTLSQIKPLHNFLTQLQPFLKLKQKQANLVLKIIEQLPSAKESPDKFLEVCTWVDQIAALNDSKTRKTTSETVRAVLDSLSEKKKSSP

SEQ ID NO: 415 - protein, 354 aa, Artificial Sequence
  Synthesized
MNTKYNKEFLLYLAGFVDSDGSIYATIAPKQQLKFKHQLQLVFVVAQATKRRWFLDKLVDEIGVGYVHDYRSASYYRLSEIKPLHNFLTQLQPFLKLKQKQANLVLKIIEQLPSAKESPDKFLEVCTWVDQIAALNDSKTRKTTSETVRAVLDSLPGSVGGLSPSQASSAASSASSSPGSGISEALRAGAGSGTGYNKEFLLYLAGFVDGDGSICASIRPCQVAKFKHALELRFTVGQKTQRRWFLDKLVDEIGVGYVYDLGSVSQYTLSQIKPLHNFLTQLQPFLKLKQKQANLVLKIIEQLPSAKESPDKFLEVCTWVDQIAALNDSKTRKTTSETVRAVLDSLSEKKKSSP

SEQ ID NO: 416 - protein, 354 aa, Artificial Sequence
  Synthesized
MNTKYNKEFLLYLAGFVDSDGSIYATIAPKQQLKFKHQLQLVFVVAQATRRRWFLDKLVDEIGVGYVHDYHTASYYRLSQIKPLHNFLTQLQPFLKLKQKQANLVLKIIEQLPSAKESPDKFLEVCTWVDQIAALNDSKTRKTTSETVRAVLDSLPGSVGGLSPSQASSAASSASSSPGSGISEALRAGAGSGTGYNKEFLLYLAGFVDGDGSICASIRPCQVAKFKHALELRFTVGQKTQRRWFLDKLVDEIGVGYVYDLGSVSQYTLSQIKPLHNFLTQLQPFLKLKQKQANLVLKIIEQLPSAKESPDKFLEVCTWVDQIAALNDSKTRKTTSETVRAVLDSLSEKKKSSP

SEQ ID NO: 417 - protein, 354 aa, Artificial Sequence
  Synthesized
MNTKYNKEFLLYLAGFVDADGSIYATIAPKQQLKFKHQLQLVFVVAQLTKRRWFLDKLVDEIGVGYVHDYRKASYYRLSEIKPLHNFLTQLQPFLKLKQKQANLVLKIIEQLPSAKESPDKFLEVCTWVDQIAALNDSRTRKTTSETVRAVLDSLPGSVGGLSPSQASSAASSASSSPGSGISEALRAGAGSGTGYNKEFLLYLAGFVDGDGSICASIRPCQVAKFKHALELRFTVGQKTQRRWFLDKLVDEIGVGYVYDLGSVSQYTLSQIKPLHNFLTQLQPFLKLKQKQANLVLKIIEQLPSAKESPDKFLEVCTWVDQIAALNDSKTRKTTSETVRAVLDSLSEKKKSSP

SEQ ID NO: 418 - protein, 354 aa, Artificial Sequence
  Synthesized
MNTKYNKEFLLYLAGFVDSDGSIYATIAPKQQLKFKHQLQLVFVVAQATRRRWFLDKLVDEIGVGYVHDYGRASYYRLSQIKPLHNFLTQLQPFLKLKQKQANLVLKIIEQLPSAKESPDKFLEVCTWVDQIAALNDSRTRKTTSETVRAVLDSLPGSVGGLSPSQASSAASSASSSPGSGISEALRAGAGSGTGYNKEFLLYLAGFVDGDGSICASIRPCQVAKFKHALELRFTVGQKTQRRWFLDKLVDEIGVGYVYDLGSVSQYTLSQIKPLHNFLTQLQPFLKLKQKQANLVLKIIEQLPSAKESPDKFLEVCTWVDQIAALNDSKTRKTTSETVRAVLDSLSEKKKSSP

SEQ ID NO: 419 - protein, 354 aa, Artificial Sequence
  Synthesized
MNTKYNKEFLLYLAGFVDSDGSIYATIAPKQQLKFKHQLQLVFVVAQKTRRRWFLDKLVDEIGVGYVHDYTHCSYYRLSQIKPLHNFLTQLQPFLKLKQKQANLVLKIIEQLPSAKESPDKFLEVCTWVDQIAALNDSRTRKTTSETVRAVLDSLPGSVGGLSPSQASSAASSASSSPGSGISEALRAGAGSGTGYNKEFLLYLAGFVDGDGSICASIRPCQVAKFKHALELRFTVGQKTQRRWFLDKLVDEIGVGYVYDLGSVSQYTLSQIKPLHNFLTQLQPFLKLKQKQANLVLKIIEQLPSAKESPDKFLEVCTWVDQIAALNDSKTRKTTSETVRAVLDSLSEKKKSSP

SEQ ID NO: 420 - protein, 354 aa, Artificial Sequence
  Synthesized
MNTKYNKEFLLYLAGFVDADGSIYATIAPKQQLKFKHQLQLVFVVAQHTRRRWFLDKLVDEIGVGYVHDYGRASYYRLSQIKPLHNFLTQLQPFLKLKQKQANLVLKIIEQLPSAKESPDKFLEVCTWVDQIAALNDSTTRKTTSETVRAVLDSLPGSVGGLSPSQASSAASSASSSPGSGISEALRAGAGSGTGYNKEFLLYLAGFVDGDGSICASIRPCQVAKFKHALELRFTVGQKTQRRWFLDKLVDEIGVGYVYDLGSVSQYTLSQIKPLHNFLTQLQPFLKLKQKQANLVLKIIEQLPSAKESPDKFLEVCTWVDQIAALNDSKTRKTTSETVRAVLDSLSEKKKSSP

SEQ ID NO: 421 - protein, 354 aa, Artificial Sequence
  Synthesized
MNTKYNKEFLLYLAGFVDSDGSIYATIAPKQQLKFKHQLQLVFVVAQKTKRRWFLDKLVDEIGVGYVHDYRAASYYRLSQIKPLHNFLTQLQPFLKLKQKQANLVLKIIEQLPSAKESPDKFLEVCTWVDQIAALNDSHTRKTTSETVRAVLDSLPGSVGGLSPSQASSAASSASSSPGSGISEALRAGAGSGTGYNKEFLLYLAGFVDGDGSICASIRPCQVAKFKHALELRFTVGQKTQRRWFLDKLVDEIGVGYVYDLGSVSQYTLSQIKPLHNFLTQLQPFLKLKQKQANLVLKIIEQLPSAKESPDKFLEVCTWVDQIAALNDSKTRKTTSETVRAVLDSLSEKKKSSP

SEQ ID NO: 422 - protein, 354 aa, Artificial Sequence
  Synthesized
MNTKYNKEFLLYLAGFVDSDGSIYATIAPKQQLKFKHQLQLVFVVAQATRRRWFLDKLVDEIGVGYVHDYLGCAYYRLSQIKPLHNFLTQLQPFLKLKQKQANLVLKIIEQLPSAKESPDKFLEVCTWVDQIAALNDSRTRKTTSETVRAVLDSLPGSVGGLSPSQASSAASSASSSPGSGISEALRAGAGSGTGYNKEFLLYLAGFVDGDGSICASIRPCQVAKFKHALELRFTVGQKTQRRWFLDKLVDEIGVGYVYDLGSVSQYTLSQIKPLHNFLTQLQPFLKLKQKQANLVLKIIEQLPSAKESPDKFLEVCTWVDQIAALNDSKTRKTTSETVRAVLDSLSEKKKSSP

SEQ ID NO: 423 - protein, 354 aa, Artificial Sequence
  Synthesized
MNTKYNKEFLLYLAGFVDSDGSIYATIAPKQQLKFKHQLQLVFVVAQKTKRRWFLDKLVDEIGVGYVHDYSGSSYYRLSEIKPLHNFLTQLQPFLKLKQKQANLVLKIIEQLPSAKESPDKFLEVCTWVDQIAALNDSRTRKTTSETVRAVLDSLPGSVGGLSPSQASSAASSASSSPGSGISEALRAGAGSGTGYNKEFLLYLAGFVDGDGSICASIRPCQVAKFKHALELRFTVGQKTQRRWFLDKLVDEIGVGYVYDLGSVSQYTLSQIKPLHNFLTQLQPFLKLKQKQANLVLKIIEQLPSAKESPDKFLEVCTWVDQIAALNDSKTRKTTSETVRAVLDSLSEKKKSSP

SEQ ID NO: 424 - protein, 354 aa, Artificial Sequence; identical to SEQ ID NO: 419
  Synthesized

SEQ ID NO: 425 - protein, 354 aa, Artificial Sequence
  Synthesized
MNTKYNKEFLLYLAGFVDSDGSIYATIAPKQQLKFKHQLQLVFVVAQRTRRRWFLDKLVDEIGVGYVHDYGRASYYRLSQIKPLHNFLTQLQPFLKLKQKQANLVLKIIEQLPSAKESPDKFLEVCTWVDQIAALNDSKTRKTTSETVRAVLDSLPGSVGGLSPSQASSAASSASSSPGSGISEALRAGAGSGTGYNKEFLLYLAGFVDGDGSICASIRPCQVAKFKHALELRFTVGQKTQRRWFLDKLVDEIGVGYVYDLGSVSQYTLSQIKPLHNFLTQLQPFLKLKQKQANLVLKIIEQLPSAKESPDKFLEVCTWVDQIAALNDSKTRKTTSETVRAVLDSLSEKKKSSP

SEQ ID NO: 426 - protein, 354 aa, Artificial Sequence
  Synthesized
MNTKYNKEFLLYLAGFVDADGSIYATIAPKQQLKFKHQLQLVFVVAQLTRRRWFLDKLVDEIGVGYVHDYRRASYYRLSQIKPLHNFLTQLQPFLKLKQKQANLVLKIIEQLPSAKESPDKFLEVCTWVDQIAALNDSRTRKTTSETVRAVLDSLPGSVGGLSPSQASSAASSASSSPGSGISEALRAGAGSGTGYNKEFLLYLAGFVDGDGSICASIRPCQVAKFKHALELRFTVGQKTQRRWFLDKLVDEIGVGYVYDLGSVSQYTLSQIKPLHNFLTQLQPFLKLKQKQANLVLKIIEQLPSAKESPDKFLEVCTWVDQIAALNDSKTRKTTSETVRAVLDSLSEKKKSSP

SEQ ID NO: 427 - protein, 354 aa, Artificial Sequence
  Synthesized
MNTKYNKEFLLYLAGFVDSDGSIYATIAPKQQLKFKHQLQLVFVVAQATKRRWFLDKLVDEIGVGYVHDYGRASYYRLSQIKPLHNFLTQLQPFLKLKQKQANLVLKIIEQLPSAKESPDKFLEVCTWVDQIAALNDSRTRKTTSETVRAVLDSLPGSVGGLSPSQASSAASSASSSPGSGISEALRAGAGSGTGYNKEFLLYLAGFVDGDGSICASIRPCQVAKFKHALELRFTVGQKTQRRWFLDKLVDEIGVGYVYDLGSVSQYTLSQIKPLHNFLTQLQPFLKLKQKQANLVLKIIEQLPSAKESPDKFLEVCTWVDQIAALNDSKTRKTTSETVRAVLDSLSEKKKSSP

SEQ ID NO: 428 - protein, 354 aa, Artificial Sequence
  Synthesized
MNTKYNKEFLLYLAGFVDSDGSIYATIAPKQQLKFKHQLQLVFVVAQKTRRRWFLDKLVDEIGVGYVHDYGNASYYRLSEIKPLHNFLTQLQPFLKLKQKQANLVLKIIEQLPSAKESPDKFLEVCTWVDQIAALNDSRTRKTTSETVRAVLDSLPGSVGGLSPSQASSAASSASSSPGSGISEALRAGAGSGTGYNKEFLLYLAGFVDGDGSICASIRPCQVAKFKHALELRFTVGQKTQRRWFLDKLVDEIGVGYVYDLGSVSQYTLSQIKPLHNFLTQLQPFLKLKQKQANLVLKIIEQLPSAKESPDKFLEVCTWVDQIAALNDSKTRKTTSETVRAVLDSLSEKKKSSP

SEQ ID NO: 429 - protein, 354 aa, Artificial Sequence
  Synthesized
MNTKYNKEFLLYLAGFVDSDGSIYATIAPKQQLKFKHQLQLVFVVAQTTRRRWFLDKLVDEIGVGYVHDYGRASYYRLSQIKPLHNFLTQLQPFLKLKQKQANLVLKIIEQLPSAKESPDKFLEVCTWVDQIAALNDSKTRKTTSETVRAVLDSLPGSVGGLSPSQASSAASSASSSPGSGISEALRAGAGSGTGYNKEFLLYLAGFVDGDGSICASIRPCQVAKFKHALELRFTVGQKTQRRWFLDKLVDEIGVGYVYDLGSVSQYTLSQIKPLHNFLTQLQPFLKLKQKQANLVLKIIEQLPSAKESPDKFLEVCTWVDQIAALNDSKTRKTTSETVRAVLDSLSEKKKSSP

SEQ ID NO: 430 - protein, 354 aa, Artificial Sequence
  Synthesized
MNTKYNKEFLLYLAGFVDSDGSIYATIAPKQQLKFKHQLQLVFVVAQATRRRWFLDKLVDEIGVGYVHDYNRAAYYRLSQIKPLHNFLTQLQPFLKLKQKQANLVLKIIEQLPSAKESPDKFLEVCTWVDQIAALNDSKTRKTTSETVRAVLDSLPGSVGGLSPSQASSAASSASSSPGSGISEALRAGAGSGTGYNKEFLLYLAGFVDGDGSICASIRPCQVAKFKHALELRFTVGQKTQRRWFLDKLVDEIGVGYVYDLGSVSQYTLSQIKPLHNFLTQLQPFLKLKQKQANLVLKIIEQLPSAKESPDKFLEVCTWVDQIAALNDSKTRKTTSETVRAVLDSLSEKKKSSP

SEQ ID NO: 431 - protein, 354 aa, Artificial Sequence
  Synthesized
MNTKYNKEFLLYLAGFVDSDGSIYATIAPKQQLKFKHQLQLVFVVAQLTSRRWFLDKLVDEIGVGYVHDYKRCSYYRLSQIKPLHNFLTQLQPFLKLKQKQANLVLKIIEQLPSAKESPDKFLEVCTWVDQIAALNDSKTRKTTSETVRAVLDSLPGSVGGLSPSQASSAASSASSSPGSGISEALRAGAGSGTGYNKEFLLYLAGFVDGDGSICASIRPCQVAKFKHALELRFTVGQKTQRRWFLDKLVDEIGVGYVYDLGSVSQYTLSQIKPLHNFLTQLQPFLKLKQKQANLVLKIIEQLPSAKESPDKFLEVCTWVDQIAALNDSKTRKTTSETVRAVLDSLSEKKKSSP

SEQ ID NO: 432 - protein, 354 aa, Artificial Sequence
  Synthesized
MNTKYNKEFLLYLAGFVDSDGSIYATIAPKQQLKFKHQLQLVFVVAQLTRRRWFLDKLVDEIGVGYVHDYNRTSYYRLSQIKPLHNFLTQLQPFLKLKQKQANLVLKIIEQLPSAKESPDKFLEVCTWVDQIAALNDSRTRKTTSETVRAVLDSLPGSVGGLSPSQASSAASSASSSPGSGISEALRAGAGSGTGYNKEFLLYLAGFVDGDGSICASIRPCQVAKFKHALELRFTVGQKTQRRWFLDKLVDEIGVGYVYDLGSVSQYTLSQIKPLHNFLTQLQPFLKLKQKQANLVLKIIEQLPSAKESPDKFLEVCTWVDQIAALNDSKTRKTTSETVRAVLDSLSEKKKSSP

SEQ ID NO: 433 - protein, 354 aa, Artificial Sequence
  Synthesized
MNTKYNKEFLLYLAGFVDSDGSIYATIAPKQQLKFKHQLQLVFVVAQKTLRRWFLDKLVDEIGVGYVHDYGRASYYRLSQIKPLHNFLTQLQPFLKLKQKQANLVLKIIEQLPSAKESPDKFLEVCTWVDQIAALNDSRTRKTTSETVRAVLDSLPGSVGGLSPSQASSAASSASSSPGSGISEALRAGAGSGTGYNKEFLLYLAGFVDGDGSICASIRPCQVAKFKHALELRFTVGQKTQRRWFLDKLVDEIGVGYVYDLGSVSQYTLSQIKPLHNFLTQLQPFLKLKQKQANLVLKIIEQLPSAKESPDKFLEVCTWVDQIAALNDSKTRKTTSETVRAVLDSLSEKKKSSP

SEQ ID NO: 434 - DNA, 22 bp, Artificial Sequence
  Synthesized
gtatagcatgtgatatacgaag

SEQ ID NO: 435 - DNA, 22 bp, Artificial Sequence
  Synthesized
catatcgtacactatatgcttc

SEQ ID NO: 436 - protein, 354 aa, Artificial Sequence
  Synthesized
MNTKYNKEFLLYLAGFVDSDGSIYATIAPKQQLKFKHQLQLVFVVAQATRRRWFLDKLVDEIGVGYVHDYRTVSYYRLSEIKPLHNFLTQLQPFLKLKQKQANLVLKIIEQLPSAKESPDKFLEVCTWVDQIAALNDSKTRKTTSETVRAVLDSLPGSVGGLSPSQASSAASSASSSPGSGISEALRAGAGSGTGYNKEFLLYLAGFVDGDGSICASIRPCQVAKFKHALELRFTVGQKTQRRWFLDKLVDEIGVGYVYDLGSVSQYTLSQIKPLHNFLTQLQPFLKLKQKQANLVLKIIEQLPSAKESPDKFLEVCTWVDQIAALNDSKTRKTTSETVRAVLDSLSEKKKSSP

SEQ ID NO: 437 - protein, 354 aa, Artificial Sequence
  Synthesized
MNTKYNKEFLLYLAGFVDADGSIYATIAPKQQLKFKHQLQLVFVVAQSTRRRWFLDKLVDEIGVGYVHDYRTVAYYRLSEIKPLHNFLTQLQPFLKLKQKQANLVLKIIEQLPSAKESPDKFLEVCTWVDQIAALNDSRTRKTTSETVRAVLDSLPGSVGGLSPSQASSAASSASSSPGSGISEALRAGAGSGTGYNKEFLLYLAGFVDGDGSICASIRPCQVAKFKHALELRFTVGQKTQRRWFLDKLVDEIGVGYVYDLGSVSQYTLSQIKPLHNFLTQLQPFLKLKQKQANLVLKIIEQLPSAKESPDKFLEVCTWVDQIAALNDSKTRKTTSETVRAVLDSLSEKKKSSP

SEQ ID NO: 438 - protein, 354 aa, Artificial Sequence
  Synthesized
MNTKYNKEFLLYLAGFVDADGSIYATIAPKQQLKFKHQLQLVFVVAQGTRRRWFLDKLVDEIGVGYVHDYGSVSYYRLSQIKPLHNFLTQLQPFLKLKQKQANLVLKIIEQLPSAKESPDKFLEVCTWVDQIAALNDSRTRKTTSETVRAVLDSLPGSVGGLSPSQASSAASSASSSPGSGISEALRAGAGSGTGYNKEFLLYLAGFVDGDGSICASIRPCQVAKFKHALELRFTVGQKTQRRWFLDKLVDEIGVGYVYDLGSVSQYTLSQIKPLHNFLTQLQPFLKLKQKQANLVLKIIEQLPSAKESPDKFLEVCTWVDQIAALNDSKTRKTTSETVRAVLDSLSEKKKSSP

SEQ ID NO: 439 - protein, 354 aa, Artificial Sequence
  Synthesized
MNTKYNKEFLLYLAGFVDADGSIYATIAPKQQLKFKHQLQLVFVVAQRTRRRWFLDKLVDEIGVGYVHDYRGVSYYRLSQIKPLHNFLTQLQPFLKLKQKQANLVLKIIEQLPSAKESPDKFLEVCTWVDQIAALNDSRTRKTTSETVRAVLDSLPGSVGGLSPSQASSAASSASSSPGSGISEALRAGAGSGTGYNKEFLLYLAGFVDGDGSICASIRPCQVAKFKHALELRFTVGQKTQRRWFLDKLVDEIGVGYVYDLGSVSQYTLSQIKPLHNFLTQLQPFLKLKQKQANLVLKIIEQLPSAKESPDKFLEVCTWVDQIAALNDSKTRKTTSETVRAVLDSLSEKKKSSP

SEQ ID NO: 440 - protein, 354 aa, Artificial Sequence
  Synthesized
MNTKYNKEFLLYLAGFVDADGSIYATIAPKQQLKFKHQLQLVFVVAQKTRRRWFLDKLVDEIGVGYVHDYRHVTYYRLSQIKPLHNFLTQLQPFLKLKQKQANLVLKIIEQLPSAKESPDKFLEVCTWVDQIAALNDSRTRKTTSETVRAVLDSLPGSVGGLSPSQASSAASSASSSPGSGISEALRAGAGSGTGYNKEFLLYLAGFVDGDGSICASIRPCQVAKFKHALELRFTVGQKTQRRWFLDKLVDEIGVGYVYDLGSVSQYTLSQIKPLHNFLTQLQPFLKLKQKQANLVLKIIEQLPSAKESPDKFLEVCTWVDQIAALNDSKTRKTTSETVRAVLDSLSEKKKSSP

SEQ ID NO: 441 - protein, 354 aa, Artificial Sequence
  Synthesized
MNTKYNKEFLLYLAGFVDSDGSIYATIAPKQQLKFKHQLQLVFVVAQSTRRRWFLDKLVDEIGVGYVHDYGTVSYYRLSEIKPLHNFLTQLQPFLKLKQKQANLVLKIIEQLPSAKESPDKFLEVCTWVDQIAALNDSRTRKTTSETVRAVLDSLPGSVGGLSPSQASSAASSASSSPGSGISEALRAGAGSGTGYNKEFLLYLAGFVDGDGSICASIRPCQVAKFKHALELRFTVGQKTQRRWFLDKLVDEIGVGYVYDLGSVSQYTLSQIKPLHNFLTQLQPFLKLKQKQANLVLKIIEQLPSAKESPDKFLEVCTWVDQIAALNDSKTRKTTSETVRAVLDSLSEKKKSSP

SEQ ID NO: 442 - protein, 354 aa, Artificial Sequence
  Synthesized
MNTKYNKEFLLYLAGFVDSDGSIYATIAPKQQLKFKHQLQLVFVVAQSTRRRWFLDKLVDEIGVGYVHDYVSVSYYRLSEIKPLHNFLTQLQPFLKLKQKQANLVLKIIEQLPSAKESPDKFLEVCTWVDQIAALNDSKTRKTTSETVRAVLDSLPGSVGGLSPSQASSAASSASSSPGSGISEALRAGAGSGTGYNKEFLLYLAGFVDGDGSICASIRPCQVAKFKHALELRFTVGQKTQRRWFLDKLVDEIGVGYVYDLGSVSQYTLSQIKPLHNFLTQLQPFLKLKQKQANLVLKIIEQLPSAKESPDKFLEVCTWVDQIAALNDSKTRKTTSETVRAVLDSLSEKKKSSP

SEQ ID NO: 443 - protein, 354 aa, Artificial Sequence
  Synthesized
MNTKYNKEFLLYLAGFVDSDGSIYATIAPKQQLKFKHQLQLVFVVAQATRRRWFLDKLVDEIGVGYVHDYSKVSYYRLSQIKPLHNFLTQLQPFLKLKQKQANLVLKIIEQLPSAKESPDKFLEVCTWVDQIAALNDSRTRKTTSETVRAVLDSLPGSVGGLSPSQASSAASSASSSPGSGISEALRAGAGSGTGYNKEFLLYLAGFVDGDGSICASIRPCQVAKFKHALELRFTVGQKTQRRWFLDKLVDEIGVGYVYDLGSVSQYTLSQIKPLHNFLTQLQPFLKLKQKQANLVLKIIEQLPSAKESPDKFLEVCTWVDQIAALNDSKTRKTTSETVRAVLDSLSEKKKSSP

SEQ ID NO: 444 - protein, 354 aa, Artificial Sequence
  Synthesized
MNTKYNKEFLLYLAGFVDSDGSIYATIAPKQQLKFKHQLQLVFVVAQGTRRRWFLDKLVDEIGVGYVHDYSGVSYYRLSQIKPLHNFLTQLQPFLKLKQKQANLVLKIIEQLPSAKESPDKFLEVCTWVDQIAALNDSKTRKTTSETVRAVLDSLPGSVGGLSPSQASSAASSASSSPGSGISEALRAGAGSGTGYNKEFLLYLAGFVDGDGSICASIRPCQVAKFKHALELRFTVGQKTQRRWFLDKLVDEIGVGYVYDLGSVSQYTLSQIKPLHNFLTQLQPFLKLKQKQANLVLKIIEQLPSAKESPDKFLEVCTWVDQIAALNDSKTRKTTSETVRAVLDSLSEKKKSSP

SEQ ID NO: 445 - protein, 354 aa, Artificial Sequence
  Synthesized
MNTKYNKEFLLYLAGFVDSDGSIYATIAPKQQLKFKHQLQLVFVVAQSTRRRWFLDKLVDEIGVGYVHDYAKVAYYRLSQIKPLHNFLTQLQPFLKLKQKQANLVLKIIEQLPSAKESPDKFLEVCTWVDQIAALNDSKTRKTTSETVRAVLDSLPGSVGGLSPSQASSAASSASSSPGSGISEALRAGAGSGTGYNKEFLLYLAGFVDGDGSICASIRPCQVAKFKHALELRFTVGQKTQRRWFLDKLVDEIGVGYVYDLGSVSQYTLSQIKPLHNFLTQLQPFLKLKQKQANLVLKIIEQLPSAKESPDKFLEVCTWVDQIAALNDSKTRKTTSETVRAVLDSLSEKKKSSP

SEQ ID NO: 446 - protein, 354 aa, Artificial Sequence
  Synthesized
MNTKYNKEFLLYLAGFVDSDGSIYATIAPKQQLKFKHQLQLVFVVAQSTRRRWFLDKLVDEIGVGYVHDYRSVAYYRLSQIKPLHNFLTQLQPFLKLKQKQANLVLKIIEQLPSAKESPDKFLEVCTWVDQIAALNDSRTRKTTSETVRAVLDSLPGSVGGLSPSQASSAASSASSSPGSGISEALRAGAGSGTGYNKEFLLYLAGFVDGDGSICASIRPCQVAKFKHALELRFTVGQKTQRRWFLDKLVDEIGVGYVYDLGSVSQYTLSQIKPLHNFLTQLQPFLKLKQKQANLVLKIIEQLPSAKESPDKFLEVCTWVDQIAALNDSKTRKTTSETVRAVLDSLSEKKKSSP

SEQ ID NO: 447 - protein, 354 aa, Artificial Sequence
  Synthesized
MNTKYNKEFLLYLAGFVDADGSIYATIAPKQQLKFKHQLQLVFVVAQSTRRRWFLDKLVDEIGVGYVHDYTRVSYYRLSEIKPLHNFLTQLQPFLKLKQKQANLVLKIIEQLPSAKESPDKFLEVCTWVDQIAALNDSKTRKTTSETVRAVLDSLPGSVGGLSPSQASSAASSASSSPGSGISEALRAGAGSGTGYNKEFLLYLAGFVDGDGSICASIRPCQVAKFKHALELRFTVGQKTQRRWFLDKLVDEIGVGYVYDLGSVSQYTLSQIKPLHNFLTQLQPFLKLKQKQANLVLKIIEQLPSAKESPDKFLEVCTWVDQIAALNDSKTRKTTSETVRAVLDSLSEKKKSSP

SEQ ID NO: 448 - protein, 354 aa, Artificial Sequence
  Synthesized
MNTKYNKEFLLYLAGFVDSDGSIYATIAPKQQLKFKHQLQLVFVVAQATRRRWFLDKLVDEIGVGYVHDYRRVAYYRLSQIKPLHNFLTQLQPFLKLKQKQANLVLKIIEQLPSAKESPDKFLEVCTWVDQIAALNDSKTRKTTSETVRAVLDSLPGSVGGLSPSQASSAASSASSSPGSGISEALRAGAGSGTGYNKEFLLYLAGFVDGDGSICASIRPCQVAKFKHALELRFTVGQKTQRRWFLDKLVDEIGVGYVYDLGSVSQYTLSQIKPLHNFLTQLQPFLKLKQKQANLVLKIIEQLPSAKESPDKFLEVCTWVDQIAALNDSKTRKTTSETVRAVLDSLSEKKKSSP

SEQ ID NO: 449 - protein, 354 aa, Artificial Sequence
  Synthesized
MNTKYNKEFLLYLAGFVDSDGSIYATIAPKQQLKFKHQLQLVFVVAQRTVRRWFLDKLVDEIGVGYVHDYNGVSYYRLSQIKPLHNFLTQLQPFLKLKQKQANLVLKIIEQLPSAKESPDKFLEVCTWVDQIAALNDSRTRKTTSETVRAVLDSLPGSVGGLSPSQASSAASSASSSPGSGISEALRAGAGSGTGYNKEFLLYLAGFVDGDGSICASIRPCQVAKFKHALELRFTVGQKTQRRWFLDKLVDEIGVGYVYDLGSVSQYTLSQIKPLHNFLTQLQPFLKLKQKQANLVLKIIEQLPSAKESPDKFLEVCTWVDQIAALNDSKTRKTTSETVRAVLDSLSEKKKSSP

SEQ ID NO: 450 - protein, 354 aa, Artificial Sequence
  Synthesized
MNTKYNKEFLLYLAGFVDADGSIYATIAPKQQLKFKHQLQLVFVVAQRTRRRWFLDKLVDEIGVGYVHDYGSVSYYRLSEIKPLHNFLTQLQPFLKLKQKQANLVLKIIEQLPSAKESPDKFLEVCTWVDQIAALNDSKTRKTTSETVRAVLDSLPGSVGGLSPSQASSAASSASSSPGSGISEALRAGAGSGTGYNKEFLLYLAGFVDGDGSICASIRPCQVAKFKHALELRFTVGQKTQRRWFLDKLVDEIGVGYVYDLGSVSQYTLSQIKPLHNFLTQLQPFLKLKQKQANLVLKIIEQLPSAKESPDKFLEVCTWVDQIAALNDSKTRKTTSETVRAVLDSLSEKKKSSP

SEQ ID NO: 451 - protein, 354 aa, Artificial Sequence
  Synthesized
MNTKYNKEFLLYLAGFVDSDGSIYATIAPKQQLKFKHQLQLVFVVAQSTRRRWFLDKLVDEIGVGYVHDYRRVSYYRLSQIKPLHNFLTQLQPFLKLKQKQANLVLKIIEQLPSAKESPDKFLEVCTWVDQIAALNDSRTRKTTSETVRAVLDSLPGSVGGLSPSQASSAASSASSSPGSGISEALRAGAGSGTGYNKEFLLYLAGFVDGDGSICASIRPCQVAKFKHALELRFTVGQKTQRRWFLDKLVDEIGVGYVYDLGSVSQYTLSQIKPLHNFLTQLQPFLKLKQKQANLVLKIIEQLPSAKESPDKFLEVCTWVDQIAALNDSKTRKTTSETVRAVLDSLSEKKKSSP

SEQ ID NO: 452 - protein, 354 aa, Artificial Sequence
  Synthesized
MNTKYNKEFLLYLAGFVDSDGSIYATIAPKQQLKFKHQLQLVFVVAQSTRRRWFLDKLVDEIGVGYVHDYRHVSYYRLSQIKPLHNFLTQLQPFLKLKQKQANLVLKIIEQLPSAKESPDKFLEVCTWVDQIAALNDSRTRKTTSETVRAVLDSLPGSVGGLSPSQASSAASSASSSPGSGISEALRAGAGSGTGYNKEFLLYLAGFVDGDGSICASIRPCQVAKFKHALELRFTVGQKTQRRWFLDKLVDEIGVGYVYDLGSVSQYTLSQIKPLHNFLTQLQPFLKLKQKQANLVLKIIEQLPSAKESPDKFLEVCTWVDQIAALNDSKTRKTTSETVRAVLDSLSEKKKSSP

SEQ ID NO: 453 - protein, 354 aa, Artificial Sequence
  Synthesized
MNTKYNKEFLLYLAGFVDADGSIYATIAPKQQLKFKHQLQLVFVVAQSTRRRWFLDKLVDEIGVGYVHDYRKVGYYRLSEIKPLHNFLTQLQPFLKLKQKQANLVLKIIEQLPSAKESPDKFLEVCTWVDQIAALNDSRTRKTTSETVRAVLDSLPGSVGGLSPSQASSAASSASSSPGSGISEALRAGAGSGTGYNKEFLLYLAGFVDGDGSICASIRPCQVAKFKHALELRFTVGQKTQRRWFLDKLVDEIGVGYVYDLGSVSQYTLSQIKPLHNFLTQLQPFLKLKQKQANLVLKIIEQLPSAKESPDKFLEVCTWVDQIAALNDSKTRKTTSETVRAVLDSLSEKKKSSP

SEQ ID NO: 454 - protein, 354 aa, Artificial Sequence
  Synthesized
MNTKYNKEFLLYLAGFVDADGSIYATIAPKQQLKFKHQLQLVFVVAQGTRRRWFLDKLVDEIGVGYVHDYSRVSYYRLSQIKPLHNFLTQLQPFLKLKQKQANLVLKIIEQLPSAKESPDKFLEVCTWVDQIAALNDSKTRKTTSETVRAVLDSLPGSVGGLSPSQASSAASSASSSPGSGISEALRAGAGSGTGYNKEFLLYLAGFVDGDGSICASIRPCQVAKFKHALELRFTVGQKTQRRWFLDKLVDEIGVGYVYDLGSVSQYTLSQIKPLHNFLTQLQPFLKLKQKQANLVLKIIEQLPSAKESPDKFLEVCTWVDQIAALNDSKTRKTTSETVRAVLDSLSEKKKSSP

SEQ ID NO: 455 - protein, 354 aa, Artificial Sequence
  Synthesized
MNTKYNKEFLLYLAGFVDSDGSIYATIAPKQQLKFKHQLQLVFVVAQKTCRRWFLDKLVDEIGVGYVHDYTGVSYYRLSQIKPLHNFLTQLQPFLKLKQKQANLVLKIIEQLPSAKESPDKFLEVCTWVDQIAALNDSRTRKTTSETVRAVLDSLPGSVGGLSPSQASSAASSASSSPGSGISEALRAGAGSGTGYNKEFLLYLAGFVDGDGSICASIRPCQVAKFKHALELRFTVGQKTQRRWFLDKLVDEIGVGYVYDLGSVSQYTLSQIKPLHNFLTQLQPFLKLKQKQANLVLKIIEQLPSAKESPDKFLEVCTWVDQIAALNDSKTRKTTSETVRAVLDSLSEKKKSSP

SEQ ID NO: 456 - protein, 354 aa, Artificial Sequence
  Synthesized
MNTKYNKEFLLYLAGFVDSDGSIYATIAPKQQLKFKHQLQLVFVVAQSTRRRWFLDKLVDEIGVGYVHDYDTVSYYRLSQIKPLHNFLTQLQPFLKLKQKQANLVLKIIEQLPSAKESPDKFLEVCTWVDQIAALNDSRTRKTTSETVRAVLDSLPGSVGGLSPSQASSAASSASSSPGSGISEALRAGAGSGTGYNKEFLLYLAGFVDGDGSICASIRPCQVAKFKHALELRFTVGQKTQRRWFLDKLVDEIGVGYVYDLGSVSQYTLSQIKPLHNFLTQLQPFLKLKQKQANLVLKIIEQLPSAKESPDKFLEVCTWVDQIAALNDSKTRKTTSETVRAVLDSLSEKKKSSP

SEQ ID NO: 457 - protein, 354 aa, Artificial Sequence
  Synthesized
MNTKYNKEFLLYLAGFVDSDGSIYATIAPKQQLKFKHQLQLVFVVAQSTRRRWFLDKLVDEIGVGYVHDYHRVAYYRLSQIKPLHNFLTQLQPFLKLKQKQANLVLKIIEQLPSAKESPDKFLEVCTWVDQIAALNDSKTRKTTSETVRAVLDSLPGSVGGLSPSQASSAASSASSSPGSGISEALRAGAGSGTGYNKEFLLYLAGFVDGDGSICASIRPCQVAKFKHALELRFTVGQKTQRRWFLDKLVDEIGVGYVYDLGSVSQYTLSQIKPLHNFLTQLQPFLKLKQKQANLVLKIIEQLPSAKESPDKFLEVCTWVDQIAALNDSKTRKTTSETVRAVLDSLSEKKKSSP

SEQ ID NO: 458 - protein, 354 aa, Artificial Sequence
  Synthesized
MNTKYNKEFLLYLAGFVDSDGSIYATIAPKQQLKFKHQLQLVFVVAQSTRRRWFLDKLVDEIGVGYVHDYHTVSYYRLSQIKPLHNFLTQLQPFLKLKQKQANLVLKIIEQLPSAKESPDKFLEVCTWVDQIAALNDSRTRKTTSETVRAVLDSLPGSVGGLSPSQASSAASSASSSPGSGISEALRAGAGSGTGYNKEFLLYLAGFVDGDGSICASIRPCQVAKFKHALELRFTVGQKTQRRWFLDKLVDEIGVGYVYDLGSVSQYTLSQIKPLHNFLTQLQPFLKLKQKQANLVLKIIEQLPSAKESPDKFLEVCTWVDQIAALNDSKTRKTTSETVRAVLDSLSEKKKSSP

SEQ ID NO: 459 - protein, 354 aa, Artificial Sequence
  Synthesized
MNTKYNKEFLLYLAGFVDADGSIYATIAPKQQLKFKHQLQLVFVVAQSTRRRWFLDKLVDEIGVGYVHDYRYVSYYRLSQIKPLHNFLTQLQPFLKLKQKQANLVLKIIEQLPSAKESPDKFLEVCTWVDQIAALNDSRTRKTTSETVRAVLDSLPGSVGGLSPSQASSAASSASSSPGSGISEALRAGAGSGTGYNKEFLLYLAGFVDGDGSICASIRPCQVAKFKHALELRFTVGQKTQRRWFLDKLVDEIGVGYVYDLGSVSQYTLSQIKPLHNFLTQLQPFLKLKQKQANLVLKIIEQLPSAKESPDKFLEVCTWVDQIAALNDSKTRKTTSETVRAVLDSLSEKKKSSP

SEQ ID NO: 460 - protein, 354 aa, Artificial Sequence
  Synthesized
MNTKYNKEFLLYLAGFVDSDGSIYATIAPKQQLKFKHQLQLVFVVAQHTRRRWFLDKLVDEIGVGYVHDYRRVAYYRLSEIKPLHNFLTQLQPFLKLKQKQANLVLKIIEQLPSAKESPDKFLEVCTWVDQIAALNDSRTRKTTSETVRAVLDSLPGSVGGLSPSQASSAASSASSSPGSGISEALRAGAGSGTGYNKEFLLYLAGFVDGDGSICASIRPCQVAKFKHALELRFTVGQKTQRRWFLDKLVDEIGVGYVYDLGSVSQYTLSQIKPLHNFLTQLQPFLKLKQKQANLVLKIIEQLPSAKESPDKFLEVCTWVDQIAALNDSKTRKTTSETVRAVLDSLSEKKKSSP

SEQ ID NO: 461 - protein, 354 aa, Artificial Sequence
  Synthesized
MNTKYNKEFLLYLAGFVDSDGSIYATIAPKQQLKFKHQLQLVFVVAQSTRRRWFLDKLVDEIGVGYVHDYSRTSYYRLSQIKPLHNFLTQLQPFLKLKQKQANLVLKIIEQLPSAKESPDKFLEVCTWVDQIAALNDSKTRKTTSETVRAVLDSLPGSVGGLSPSQASSAASSASSSPGSGISEALRAGAGSGTGYNKEFLLYLAGFVDGDGSICASIRPCQVAKFKHALELRFTVGQKTQRRWFLDKLVDEIGVGYVYDLGSVSQYTLSQIKPLHNFLTQLQPFLKLKQKQANLVLKIIEQLPSAKESPDKFLEVCTWVDQIAALNDSKTRKTTSETVRAVLDSLSEKKKSSP

SEQ ID NO: 462 - protein, 354 aa, Artificial Sequence
  Synthesized
MNTKYNKEFLLYLAGFVDADGSIYATIAPKQQLKFKHQLQLVFVVAQKTSRRWFLDKLVDEIGVGYVHDYATASYYRLSQIKPLHNFLTQLQPFLKLKQKQANLVLKIIEQLPSAKESPDKFLEVCTWVDQIAALNDSRTRKTTSETVRAVLDSLPGSVGGLSPSQASSAASSASSSPGSGISEALRAGAGSGTGYNKEFLLYLAGFVDGDGSICASIRPCQVAKFKHALELRFTVGQKTQRRWFLDKLVDEIGVGYVYDLGSVSQYTLSQIKPLHNFLTQLQPFLKLKQKQANLVLKIIEQLPSAKESPDKFLEVCTWVDQIAALNDSKTRKTTSETVRAVLDSLSEKKKSSP

SEQ ID NO: 463 - DNA, 22 bp, Artificial Sequence
  Synthesized
gtatagcatgtgctatacgaag

SEQ ID NO: 464 - DNA, 22 bp, Artificial Sequence
  Synthesized
catatcgtacacgatatgcttc

SEQ ID NO: 465 - protein, 354 aa, Artificial Sequence
  Synthesized
MNTKYNKEFLLYLAGFVDSDGSIYATIAPKQQLKFKHQLQLVFVVAQLTRRRWFLDKLVDEIGVGYVHDYSKVSYYRLSQIKPLHNFLTQLQPFLKLKQKQANLVLKIIEQLPSAKESPDKFLEVCTWVDQIAALNDSKTRKTTSETVRAVLDSLPGSVGGLSPSQASSAASSASSSPGSGISEALRAGAGSGTGYNKEFLLYLAGFVDGDGSICASIRPCQVAKFKHALELRFTVGQKTQRRWFLDKLVDEIGVGYVYDLGSVSQYTLSQIKPLHNFLTQLQPFLKLKQKQANLVLKIIEQLPSAKESPDKFLEVCTWVDQIAALNDSKTRKTTSETVRAVLDSLSEKKKSSP

SEQ ID NO: 466 - protein, 354 aa, Artificial Sequence
  Synthesized
MNTKYNKEFLLYLAGFVDSDGSIYATIAPKQQLKFKHQLQLVFVVAQKTRRRWFLDKLVDEIGVGYVHDYSSTAYYRLSQIKPLHNFLTQLQPFLKLKQKQANLVLKIIEQLPSAKESPDKFLEVCTWVDQIAALNDSKTRKTTSETVRAVLDSLPGSVGGLSPSQASSAASSASSSPGSGISEALRAGAGSGTGYNKEFLLYLAGFVDGDGSICASIRPCQVAKFKHALELRFTVGQKTQRRWFLDKLVDEIGVGYVYDLGSVSQYTLSQIKPLHNFLTQLQPFLKLKQKQANLVLKIIEQLPSAKESPDKFLEVCTWVDQIAALNDSKTRKTTSETVRAVLDSLSEKKKSSP

SEQ ID NO: 467 - protein, 354 aa, Artificial Sequence
  Synthesized
MNTKYNKEFLLYLAGFVDSDGSIYATIAPKQQLKFKHQLQLVFVVAQRTRRRWFLDKLVDEIGVGYVHDYKMCSYYRLSEIKPLHNFLTQLQPFLKLKQKQANLVLKIIEQLPSAKESPDKFLEVCTWVDQIAALNDSKTRKTTSETVRAVLDSLPGSVGGLSPSQASSAASSASSSPGSGISEALRAGAGSGTGYNKEFLLYLAGFVDGDGSICASIRPCQVAKFKHALELRFTVGQKTQRRWFLDKLVDEIGVGYVYDLGSVSQYTLSQIKPLHNFLTQLQPFLKLKQKQANLVLKIIEQLPSAKESPDKFLEVCTWVDQIAALNDSKTRKTTSETVRAVLDSLSEKKKSSP

SEQ ID NO: 468 - protein, 354 aa, Artificial Sequence
  Synthesized
MNTKYNKEFLLYLAGFVDSDGSIYATIAPKQQLKFKHQLQLVFVVAQLTRRRWFLDKLVDEIGVGYVHDYGPCSYYRLSEIKPLHNFLTQLQPFLKLKQKQANLVLKIIEQLPSAKESPDKFLEVCTWVDQIAALNDSKTRKTTSETVRAVLDSLPGSVGGLSPSQASSAASSASSSPGSGISEALRAGAGSGTGYNKEFLLYLAGFVDGDGSICASIRPCQVAKFKHALELRFTVGQKTQRRWFLDKLVDEIGVGYVYDLGSVSQYTLSQIKPLHNFLTQLQPFLKLKQKQANLVLKIIEQLPSAKESPDKFLEVCTWVDQIAALNDSKTRKTTSETVRAVLDSLSEKKKSSP

SEQ ID NO: 469 - protein, 354 aa, Artificial Sequence
  Synthesized
MNTKYNKEFLLYLAGFVDSDGSIYATIAPKQQLKFKHQLQLVFVVAQHTRRRWFLDKLVDEIGVGYVHDYNGTSYYRLSQIKPLHNFLTQLQPFLKLKQKQANLVLKIIEQLPSAKESPDKFLEVCTWVDQIAALNDSTTRKTTSETVRAVLDSLPGSVGGLSPSQASSAASSASSSPGSGISEALRAGAGSGTGYNKEFLLYLAGFVDGDGSICASIRPCQVAKFKHALELRFTVGQKTQRRWFLDKLVDEIGVGYVYDLGSVSQYTLSQIKPLHNFLTQLQPFLKLKQKQANLVLKIIEQLPSAKESPDKFLEVCTWVDQIAALNDSKTRKTTSETVRAVLDSLSEKKKSSP

SEQ ID NO: 470 - protein, 354 aa, Artificial Sequence
  Synthesized
MNTKYNKEFLLYLAGFVDSDGSIYATIAPKQQLKFKHQLQLVFVVAQATRRRWFLDKLVDEIGVGYVHDYACTSYYRLSQIKPLHNFLTQLQPFLKLKQKQANLVLKIIEQLPSAKESPDKFLEVCTWVDQIAALNDSKTRKTTSETVRAVLDSLPGSVGGLSPSQASSAASSASSSPGSGISEALRAGAGSGTGYNKEFLLYLAGFVDGDGSICASIRPCQVAKFKHALELRFTVGQKTQRRWFLDKLVDEIGVGYVYDLGSVSQYTLSQIKPLHNFLTQLQPFLKLKQKQANLVLKIIEQLPSAKESPDKFLEVCTWVDQIAALNDSKTRKTTSETVRAVLDSLSEKKKSSP

SEQ ID NO: 471 - protein, 354 aa, Artificial Sequence
  Synthesized
MNTKYNKEFLLYLAGFVDADGSIYATIAPKQQLKFKHQLQLVFVVAQKTKRRWFLDKLVDEIGVGYVHDYTTTAYYRLSQIKPLHNFLTQLQPFLKLKQKQANLVLKIIEQLPSAKESPDKFLEVCTWVDQIAALNDSKTRKTTSETVRAVLDSLPGSVGGLSPSQASSAASSASSSPGSGISEALRAGAGSGTGYNKEFLLYLAGFVDGDGSICASIRPCQVAKFKHALELRFTVGQKTQRRWFLDKLVDEIGVGYVYDLGSVSQYTLSQIKPLHNFLTQLQPFLKLKQKQANLVLKIIEQLPSAKESPDKFLEVCTWVDQIAALNDSKTRKTTSETVRAVLDSLSEKKKSSP

SEQ ID NO: 472 - protein, 354 aa, Artificial Sequence
  Synthesized
MNTKYNKEFLLYLAGFVDSDGSIYATIAPKQQLKFKHQLQLVFVVAQATRRRWFLDKLVDEIGVGYVHDYSHTSYYRLSQIKPLHNFLTQLQPFLKLKQKQANLVLKIIEQLPSAKESPDKFLEVCTWVDQIAALNDSKTRKTTSETVRAVLDSLPGSVGGLSPSQASSAASSASSSPGSGISEALRAGAGSGTGYNKEFLLYLAGFVDGDGSICASIRPCQVAKFKHALELRFTVGQKTQRRWFLDKLVDEIGVGYVYDLGSVSQYTLSQIKPLHNFLTQLQPFLKLKQKQANLVLKIIEQLPSAKESPDKFLEVCTWVDQIAALNDSKTRKTTSETVRAVLDSLSEKKKSSP

SEQ ID NO: 473 - protein, 354 aa, Artificial Sequence
  Synthesized
MNTKYNKEFLLYLAGFVDADGSIYATIAPKQQLKFKHQLQLVFVVAQKTRRRWFLDKLVDEIGVGYVHDYIPTSYYRLSQIKPLHNFLTQLQPFLKLKQKQANLVLKIIEQLPSAKESPDKFLEVCTWVDQIAALNDSKTRKTTSETVRAVLDSLPGSVGGLSPSQASSAASSASSSPGSGISEALRAGAGSGTGYNKEFLLYLAGFVDGDGSICASIRPCQVAKFKHALELRFTVGQKTQRRWFLDKLVDEIGVGYVYDLGSVSQYTLSQIKPLHNFLTQLQPFLKLKQKQANLVLKIIEQLPSAKESPDKFLEVCTWVDQIAALNDSKTRKTTSETVRAVLDSLSEKKKSSP

SEQ ID NO: 474 - protein, 354 aa, Artificial Sequence
  Synthesized
MNTKYNKEFLLYLAGFVDADGSIYATIAPKQQLKFKHQLQLVFVVAQKTSRRWFLDKLVDEIGVGYVHDYEPTSYYRLSQIKPLHNFLTQLQPFLKLKQKQANLVLKIIEQLPSAKESPDKFLEVCTWVDQIAALNDSKTRKTTSETVRAVLDSLPGSVGGLSPSQASSAASSASSSPGSGISEALRAGAGSGTGYNKEFLLYLAGFVDGDGSICASIRPCQVAKFKHALELRFTVGQKTQRRWFLDKLVDEIGVGYVYDLGSVSQYTLSQIKPLHNFLTQLQPFLKLKQKQANLVLKIIEQLPSAKESPDKFLEVCTWVDQIAALNDSKTRKTTSETVRAVLDSLSEKKKSSP

SEQ ID NO: 475 - protein, 354 aa, Artificial Sequence
  Synthesized
MNTKYNKEFLLYLAGFVDSDGSIYATIAPKQQLKFKHQLQLVFVVAQRTRRRWFLDKLVDEIGVGYVHDYYTTSYYRLSQIKPLHNFLTQLQPFLKLKQKQANLVLKIIEQLPSAKESPDKFLEVCTWVDQIAALNDSKTRKTTSETVRAVLDSLPGSVGGLSPSQASSAASSASSSPGSGISEALRAGAGSGTGYNKEFLLYLAGFVDGDGSICASIRPCQVAKFKHALELRFTVGQKTQRRWFLDKLVDEIGVGYVYDLGSVSQYTLSQIKPLHNFLTQLQPFLKLKQKQANLVLKIIEQLPSAKESPDKFLEVCTWVDQIAALNDSKTRKTTSETVRAVLDSLSEKKKSSP

SEQ ID NO: 476 - protein, 354 aa, Artificial Sequence
  Synthesized
MNTKYNKEFLLYLAGFVDSDGSIYATIAPKQQLKFKHQLQLVFVVAQHTRRRWFLDKLVDEIGVGYVHDYRSASYYRLSEIKPLHNFLTQLQPFLKLKQKQANLVLKIIEQLPSAKESPDKFLEVCTWVDQIAALNDSKTRKTTSETVRAVLDSLPGSVGGLSPSQASSAASSASSSPGSGISEALRAGAGSGTGYNKEFLLYLAGFVDGDGSICASIRPCQVAKFKHALELRFTVGQKTQRRWFLDKLVDEIGVGYVYDLGSVSQYTLSQIKPLHNFLTQLQPFLKLKQKQANLVLKIIEQLPSAKESPDKFLEVCTWVDQIAALNDSKTRKTTSETVRAVLDSLSEKKKSSP

SEQ ID NO: 477 - protein, 354 aa, Artificial Sequence
  Synthesized
MNTKYNKEFLLYLAGFVDSDGSIYATIAPKQQLKFKHQLQLVFVVAQKTRRRWFLDKLVDEIGVGYVHDYQSNSYYRLSQIKPLHNFLTQLQPFLKLKQKQANLVLKIIEQLPSAKESPDKFLEVCTWVDQIAALNDSKTRKTTSETVRAVLDSLPGSVGGLSPSQASSAASSASSSPGSGISEALRAGAGSGTGYNKEFLLYLAGFVDGDGSICASIRPCQVAKFKHALELRFTVGQKTQRRWFLDKLVDEIGVGYVYDLGSVSQYTLSQIKPLHNFLTQLQPFLKLKQKQANLVLKIIEQLPSAKESPDKFLEVCTWVDQIAALNDSKTRKTTSETVRAVLDSLSEKKKSSP

SEQ ID NO: 478 - protein, 354 aa, Artificial Sequence
  Synthesized
MNTKYNKEFLLYLAGFVDSDGSIYATIAPKQQLKFKHQLQLVFVVAQKTRRRWFLDKLVDEIGVGYVHDYYNNSYYRLSQIKPLHNFLTQLQPFLKLKQKQANLVLKIIEQLPSAKESPDKFLEVCTWVDQIAALNDSKTRKTTSETVRAVLDSLPGSVGGLSPSQASSAASSASSSPGSGISEALRAGAGSGTGYNKEFLLYLAGFVDGDGSICASIRPCQVAKFKHALELRFTVGQKTQRRWFLDKLVDEIGVGYVYDLGSVSQYTLSQIKPLHNFLTQLQPFLKLKQKQANLVLKIIEQLPSAKESPDKFLEVCTWVDQIAALNDSKTRKTTSETVRAVLDSLSEKKKSSP

SEQ ID NO: 479 - protein, 354 aa, Artificial Sequence
  Synthesized
MNTKYNKEFLLYLAGFVDADGSIYATIAPKQQLKFKHQLQLVFVVAQKTVRRWFLDKLVDEIGVGYVHDYRATTYYRLSEIKPLHNFLTQLQPFLKLKQKQANLVLKIIEQLPSAKESPDKFLEVCTWVDQIAALNDSKTRKTTSETVRAVLDSLPGSVGGLSPSQASSAASSASSSPGSGISEALRAGAGSGTGYNKEFLLYLAGFVDGDGSICASIRPCQVAKFKHALELRFTVGQKTQRRWFLDKLVDEIGVGYVYDLGSVSQYTLSQIKPLHNFLTQLQPFLKLKQKQANLVLKIIEQLPSAKESPDKFLEVCTWVDQIAALNDSKTRKTTSETVRAVLDSLSEKKKSSP

SEQ ID NO: 480 - protein, 354 aa, Artificial Sequence
  Synthesized
MNTKYNKEFLLYLAGFVDSDGSIYATIAPKQQLKFKHQLQLVFVVAQRTKRRWFLDKLVDEIGVGYVHDYSSTSYYRLSQIKPLHNFLTQLQPFLKLKQKQANLVLKIIEQLPSAKESPDKFLEVCTWVDQIAALNDSKTRKTTSETVRAVLDSLPGSVGGLSPSQASSAASSASSSPGSGISEALRAGAGSGTGYNKEFLLYLAGFVDGDGSICASIRPCQVAKFKHALELRFTVGQKTQRRWFLDKLVDEIGVGYVYDLGSVSQYTLSQIKPLHNFLTQLQPFLKLKQKQANLVLKIIEQLPSAKESPDKFLEVCTWVDQIAALNDSKTRKTTSETVRAVLDSLSEKKKSSP

SEQ ID NO: 481 - protein, 354 aa, Artificial Sequence
  Synthesized
MNTKYNKEFLLYLAGFVDSDGSIYATIAPKQQLKFKHQLQLVFVVAQKTRRRWFLDKLVDEIGVGYVHDYSMVSYYRLSQIKPLHNFLTQLQPFLKLKQKQANLVLKIIEQLPSAKESPDKFLEVCTWVDQIAALNDSRTRKTTSETVRAVLDSLPGSVGGLSPSQASSAASSASSSPGSGISEALRAGAGSGTGYNKEFLLYLAGFVDGDGSICASIRPCQVAKFKHALELRFTVGQKTQRRWFLDKLVDEIGVGYVYDLGSVSQYTLSQIKPLHNFLTQLQPFLKLKQKQANLVLKIIEQLPSAKESPDKFLEVCTWVDQIAALNDSKTRKTTSETVRAVLDSLSEKKKSSP

SEQ ID NO: 482 - protein, 354 aa, Artificial Sequence
  Synthesized
MNTKYNKEFLLYLAGFVDADGSIYATIAPKQQLKFKHQLQLVFVVAQLTKRRWFLDKLVDEIGVGYVHDYTATSYYRLSQIKPLHNFLTQLQPFLKLKQKQANLVLKIIEQLPSAKESPDKFLEVCTWVDQIAALNDSKTRKTTSETVRAVLDSLPGSVGGLSPSQASSAASSASSSPGSGISEALRAGAGSGTGYNKEFLLYLAGFVDGDGSICASIRPCQVAKFKHALELRFTVGQKTQRRWFLDKLVDEIGVGYVYDLGSVSQYTLSQIKPLHNFLTQLQPFLKLKQKQANLVLKIIEQLPSAKESPDKFLEVCTWVDQIAALNDSKTRKTTSETVRAVLDSLSEKKKSSP

SEQ ID NO: 483 - protein, 354 aa, Artificial Sequence
  Synthesized
MNTKYNKEFLLYLAGFVDSDGSIYATIAPKQQLKFKHQLQLVFVVAQNTRRRWFLDKLVDEIGVGYVHDYRSTAYYRLSQIKPLHNFLTQLQPFLKLKQKQANLVLKIIEQLPSAKESPDKFLEVCTWVDQIAALNDSKTRKTTSETVRAVLDSLPGSVGGLSPSQASSAASSASSSPGSGISEALRAGAGSGTGYNKEFLLYLAGFVDGDGSICASIRPCQVAKFKHALELRFTVGQKTQRRWFLDKLVDEIGVGYVYDLGSVSQYTLSQIKPLHNFLTQLQPFLKLKQKQANLVLKIIEQLPSAKESPDKFLEVCTWVDQIAALNDSKTRKTTSETVRAVLDSLSEKKKSSP

SEQ ID NO: 484 - protein, 354 aa, Artificial Sequence
  Synthesized
MNTKYNKEFLLYLAGFVDADGSIYATIAPKQQLKFKHQLQLVFVVAQKTRRRWFLDKLVDEIGVGYVHDYYRTSYYRLSQIKPLHNFLTQLQPFLKLKQKQANLVLKIIEQLPSAKESPDKFLEVCTWVDQIAALNDSHTRKTTSETVRAVLDSLPGSVGGLSPSQASSAASSASSSPGSGISEALRAGAGSGTGYNKEFLLYLAGFVDGDGSICASIRPCQVAKFKHALELRFTVGQKTQRRWFLDKLVDEIGVGYVYDLGSVSQYTLSQIKPLHNFLTQLQPFLKLKQKQANLVLKIIEQLPSAKESPDKFLEVCTWVDQIAALNDSKTRKTTSETVRAVLDSLSEKKKSSP

SEQ ID NO: 485 - protein, 354 aa, Artificial Sequence
  Synthesized
MNTKYNKEFLLYLAGFVDSDGSIYATIAPKQQLKFKHQLQLVFVVAQKTRRRWFLDKLVDEIGVGYVHDYGPTSYYRLSQIKPLHNFLTQLQPFLKLKQKQANLVLKIIEQLPSAKESPDKFLEVCTWVDQIAALNDSVTRKTTSETVRAVLDSLPGSVGGLSPSQASSAASSASSSPGSGISEALRAGAGSGTGYNKEFLLYLAGFVDGDGSICASIRPCQVAKFKHALELRFTVGQKTQRRWFLDKLVDEIGVGYVYDLGSVSQYTLSQIKPLHNFLTQLQPFLKLKQKQANLVLKIIEQLPSAKESPDKFLEVCTWVDQIAALNDSKTRKTTSETVRAVLDSLSEKKKSSP

SEQ ID NO: 486 - protein, 354 aa, Artificial Sequence
  Synthesized
MNTKYNKEFLLYLAGFVDSDGSIYATIAPKQQLKFKHQLQLVFVVAQRTVRRWFLDKLVDEIGVGYVHDYNSTSYYRLSEIKPLHNFLTQLQPFLKLKQKQANLVLKIIEQLPSAKESPDKFLEVCTWVDQIAALNDSKTRKTTSETVRAVLDSLPGSVGGLSPSQASSAASSASSSPGSGISEALRAGAGSGTGYNKEFLLYLAGFVDGDGSICASIRPCQVAKFKHALELRFTVGQKTQRRWFLDKLVDEIGVGYVYDLGSVSQYTLSQIKPLHNFLTQLQPFLKLKQKQANLVLKIIEQLPSAKESPDKFLEVCTWVDQIAALNDSKTRKTTSETVRAVLDSLSEKKKSSP

SEQ ID NO: 487 - protein, 354 aa, Artificial Sequence
  Synthesized
MNTKYNKEFLLYLAGFVDADGSIYATIAPKQQLKFKHQLQLVFVVAQLTRRRWFLDKLVDEIGVGYVHDYSQTSYYRLSEIKPLHNFLTQLQPFLKLKQKQANLVLKIIEQLPSAKESPDKFLEVCTWVDQIAALNDSKTRKTTSETVRAVLDSLPGSVGGLSPSQASSAASSASSSPGSGISEALRAGAGSGTGYNKEFLLYLAGFVDGDGSICASIRPCQVAKFKHALELRFTVGQKTQRRWFLDKLVDEIGVGYVYDLGSVSQYTLSQIKPLHNFLTQLQPFLKLKQKQANLVLKIIEQLPSAKESPDKFLEVCTWVDQIAALNDSKTRKTTSETVRAVLDSLSEKKKSSP

SEQ ID NO: 488 - protein, 354 aa, Artificial Sequence
  Synthesized
MNTKYNKEFLLYLAGFVDADGSIYATIAPKQQLKFKHQLQLVFVVAQKTRRRWFLDKLVDEIGVGYVHDYFRTSYYRLSEIKPLHNFLTQLQPFLKLKQKQANLVLKIIEQLPSAKESPDKFLEVCTWVDQIAALNDSKTRKTTSETVRAVLDSLPGSVGGLSPSQASSAASSASSSPGSGISEALRAGAGSGTGYNKEFLLYLAGFVDGDGSICASIRPCQVAKFKHALELRFTVGQKTQRRWFLDKLVDEIGVGYVYDLGSVSQYTLSQIKPLHNFLTQLQPFLKLKQKQANLVLKIIEQLPSAKESPDKFLEVCTWVDQIAALNDSKTRKTTSETVRAVLDSLSEKKKSSP

SEQ ID NO: 489 - protein, 354 aa, Artificial Sequence
  Synthesized
MNTKYNKEFLLYLAGFVDADGSIYATIAPKQQLKFKHQLQLVFVVAQRTIRRWFLDKLVDEIGVGYVHDYGAVSYYRLSQIKPLHNFLTQLQPFLKLKQKQANLVLKIIEQLPSAKESPDKFLEVCTWVDQIAALNDSKTRKTTSETVRAVLDSLPGSVGGLSPSQASSAASSASSSPGSGISEALRAGAGSGTGYNKEFLLYLAGFVDGDGSICASIRPCQVAKFKHALELRFTVGQKTQRRWFLDKLVDEIGVGYVYDLGSVSQYTLSQIKPLHNFLTQLQPFLKLKQKQANLVLKIIEQLPSAKESPDKFLEVCTWVDQIAALNDSKTRKTTSETVRAVLDSLSEKKKSSP

SEQ ID NO: 490 - protein, 354 aa, Artificial Sequence
  Synthesized
MNTKYNKEFLLYLAGFVDSDGSIYATIAPKQQLKFKHQLQLVFVVAQSTRRRWFLDKLVDEIGVGYVHDYRNCSYYRLSQIKPLHNFLTQLQPFLKLKQKQANLVLKIIEQLPSAKESPDKFLEVCTWVDQIAALNDSTTRKTTSETVRAVLDSLPGSVGGLSPSQASSAASSASSSPGSGISEALRAGAGSGTGYNKEFLLYLAGFVDGDGSICASIRPCQVAKFKHALELRFTVGQKTQRRWFLDKLVDEIGVGYVYDLGSVSQYTLSQIKPLHNFLTQLQPFLKLKQKQANLVLKIIEQLPSAKESPDKFLEVCTWVDQIAALNDSKTRKTTSETVRAVLDSLSEKKKSSP

SEQ ID NO: 491 - protein, 354 aa, Artificial Sequence
  Synthesized
MNTKYNKEFLLYLAGFVDSDGSIYATIAPKQQLKFKHQLQLVFVVAQNTGRRWFLDKLVDEIGVGYVHDYVGVTYYRLSQIKPLHNFLTQLQPFLKLKQKQANLVLKIIEQLPSAKESPDKFLEVCTWVDQIAALNDSHTRKTTSETVRAVLDSLPGSVGGLSPSQASSAASSASSSPGSGISEALRAGAGSGTGYNKEFLLYLAGFVDGDGSICASIRPCQVAKFKHALELRFTVGQKTQRRWFLDKLVDEIGVGYVYDLGSVSQYTLSQIKPLHNFLTQLQPFLKLKQKQANLVLKIIEQLPSAKESPDKFLEVCTWVDQIAALNDSKTRKTTSETVRAVLDSLSEKKKSSP

SEQ ID NO: 492 - protein, 354 aa, Artificial Sequence
  Synthesized
MNTKYNKEFLLYLAGFVDADGSIYATIAPKQQLKFKHQLQLVFVVAQSTRRRWFLDKLVDEIGVGYVHDYRMLSYYRLSEIKPLHNFLTQLQPFLKLKQKQANLVLKIIEQLPSAKESPDKFLEVCTWVDQIAALNDSKTRKTTSETVRAVLDSLPGSVGGLSPSQASSAASSASSSPGSGISEALRAGAGSGTGYNKEFLLYLAGFVDGDGSICASIRPCQVAKFKHALELRFTVGQKTQRRWFLDKLVDEIGVGYVYDLGSVSQYTLSQIKPLHNFLTQLQPFLKLKQKQANLVLKIIEQLPSAKESPDKFLEVCTWVDQIAALNDSKTRKTTSETVRAVLDSLSEKKKSSP

SEQ ID NO: 493 - protein, 354 aa, Artificial Sequence
  Synthesized
MNTKYNKEFLLYLAGFVDSDGSIYATIAPKQQLKFKHQLQLVFVVAQHTRRRWFLDKLVDEIGVGYVHDYSRTSYYRLSQIKPLHNFLTQLQPFLKLKQKQANLVLKIIEQLPSAKESPDKFLEVCTWVDQIAALNDSSTRKTTSETVRAVLDSLPGSVGGLSPSQASSAASSASSSPGSGISEALRAGAGSGTGYNKEFLLYLAGFVDGDGSICASIRPCQVAKFKHALELRFTVGQKTQRRWFLDKLVDEIGVGYVYDLGSVSQYTLSQIKPLHNFLTQLQPFLKLKQKQANLVLKIIEQLPSAKESPDKFLEVCTWVDQIAALNDSKTRKTTSETVRAVLDSLSEKKKSSP

SEQ ID NO: 494 - protein, 354 aa, Artificial Sequence
  Synthesized
MNTKYNKEFLLYLAGFVDSDGSIYATIAPKQQLKFKHQLQLVFVVAQKTKRRWFLDKLVDEIGVGYVHDYTDTAYYRLSQIKPLHNFLTQLQPFLKLKQKQANLVLKIIEQLPSAKESPDKFLEVCTWVDQIAALNDSKTRKTTSETVRAVLDSLPGSVGGLSPSQASSAASSASSSPGSGISEALRAGAGSGTGYNKEFLLYLAGFVDGDGSICASIRPCQVAKFKHALELRFTVGQKTQRRWFLDKLVDEIGVGYVYDLGSVSQYTLSQIKPLHNFLTQLQPFLKLKQKQANLVLKIIEQLPSAKESPDKFLEVCTWVDQIAALNDSKTRKTTSETVRAVLDSLSEKKKSSP

SEQ ID NO: 495 - protein, 354 aa, Artificial Sequence
  Synthesized
MNTKYNKEFLLYLAGFVDSDGSIYATIAPKQQLKFKHQLQLVFVVAQKTSRRWFLDKLVDEIGVGYVHDYSKTSYYRLSQIKPLHNFLTQLQPFLKLKQKQANLVLKIIEQLPSAKESPDKFLEVCTWVDQIAALNDSKTRKTTSETVRAVLDSLPGSVGGLSPSQASSAASSASSSPGSGISEALRAGAGSGTGYNKEFLLYLAGFVDGDGSICASIRPCQVAKFKHALELRFTVGQKTQRRWFLDKLVDEIGVGYVYDLGSVSQYTLSQIKPLHNFLTQLQPFLKLKQKQANLVLKIIEQLPSAKESPDKFLEVCTWVDQIAALNDSKTRKTTSETVRAVLDSLSEKKKSSP

SEQ ID NO: 496 - DNA, 22 bp, Artificial Sequence
  Synthesized
gtatagcatgtggtatacgaag

SEQ ID NO: 497 - DNA, 22 bp, Artificial Sequence
  Synthesized
catatcgtacaccatatgcttc

SEQ ID NO: 498 - protein, 354 aa, Artificial Sequence
  Synthesized
MNTKYNKEFLLYLAGFVDADGSIYATIAPKQQLKFKHQLQLVFVVAQKTRRRWFLDKLVDEIGVGYVHDYSGRSYYRLSQIKPLHNFLTQLQPFLKLKQKQANLVLKIIEQLPSAKESPDKFLEVCTWVDQIAALNDSKTRKTTSETVRAVLDSLPGSVGGLSPSQASSAASSASSSPGSGISEALRAGAGSGTGYNKEFLLYLAGFVDADGSIYACILPMQARKFKHQLSLTFTVYQKTQRRWFLDKLVDEIGVGYVCDKGSVSAYMLSQIKPLHNFLTQLQPFLKLKQKQANLVLKIIEQLPSAKESPDKFLEVCTWVDQIAALNDSKTRKTTSETVRAVLDSLSEKKKSSP

SEQ ID NO: 499 - protein, 354 aa, Artificial Sequence
  Synthesized
MNTKYNKEFLLYLAGFVDGDGSIYAVIQPGQKYKFKHNLRLTFRVSQKTQRRWFLDKLVDEVGVGYVSDHGSVSSYLLSQIKPLHNFLTQLQPFLKLKQKQANLVLKIIEQLPSAKESPDKFLEVCTWVDQIAALNDSKTRKTTSETVRAVLDSLPGSVGGLSPSQASSAASSASSSPGSGISEALRAGAGSGTGYNKEFLLYLAGFVDADGSIYACILPMQARKFKHQLSLTFTVYQKTQRRWFLDKLVDEIGVGYVCDKGSVSAYMLSQIKPLHNFLTQLQPFLKLKQKQANLVLKIIEQLPSAKESPDKFLEVCTWVDQIAALNDSKTRKTTSETVRAVLDSLSEKKKSSP

SEQ ID NO: 500 - protein, 354 aa, Artificial Sequence
  Synthesized
MNTKYNKEFLLYLAGFVDGDGSIYAGIGPNQACKFKHQLYLRFRVSQKTQRRWFLDKLVDEIGVGYVTDEGSVSIYTLSEIKPLHNFLTQLQPFLKLKQKQANLVLKIIEQLPSAKESPDKFLEVCTWVDQIAALNDSKTRKTTSETVRAVLDSLPGSVGGLSPSQASSAASSASSSPGSGISEALRAGAGSGTGYNKEFLLYLAGFVDADGSIYACILPMQARKFKHQLSLTFTVYQKTQRRWFLDKLVDEIGVGYVCDKGSVSAYMLSQIKPLHNFLTQLQPFLKLKQKQANLVLKIIEQLPSAKESPDKFLEVCTWVDQIAALNDSKTRKTTSETVRAVLDSLSEKKKSSP

SEQ ID NO: 501 - protein, 354 aa, Artificial Sequence
  Synthesized
MNTKYNKEFLLYLAGFVDSDGSIYATIAPKQQLKFKHQLQLVFVVAQKTRRRWFLDKLVDEIGVGYVHDYDGRSYYRLSQIKPLHNFLTQLQPFLKLKQKQANLVLKIIEQLPSAKESPDKFLEVCTWVDQIAALNDSKTRKTTSETVRAVLDSLPGSVGGLSPSQASSAASSASSSPGSGISEALRAGAGSGTGYNKEFLLYLAGFVDADGSIYACILPMQARKFKHQLSLTFTVYQKTQRRWFLDKLVDEIGVGYVCDKGSVSAYMLSQIKPLHNFLTQLQPFLKLKQKQANLVLKIIEQLPSAKESPDKFLEVCTWVDQIAALNDSKTRKTTSETVRAVLDSLSEKKKSSP

SEQ ID NO: 502 - DNA, 22 bp, Artificial Sequence
  Synthesized
gtatagcatgtgttatacgaag

SEQ ID NO: 503 - DNA, 22 bp, Artificial Sequence
  Synthesized
catatcgtacacaatatgcttc

SEQ ID NO: 504 - protein, 354 aa, Artificial Sequence
  Synthesized
MNTKYNKEFLLYLAGFVDSDGSIYATIAPKQQLKFKHQLQLVFVVAQKTVRRWFLDKLVDEIGVGYVHDYGRASYYRLSQIKPLHNFLTQLQPFLKLKQKQANLVLKIIEQLPSAKESPDKFLEVCTWVDQIAALNDSRTRKTTSETVRAVLDSLPGSVGGLSPSQASSAASSASSSPGSGISEALRAGAGSGTGYNKEFLLYLAGFVDGDGSICASIRPCQVAKFKHALELRFTVGQKTQRRWFLDKLVDEIGVGYVYDLGSVSQYTLSQIKPLHNFLTQLQPFLKLKQKQANLVLKIIEQLPSAKESPDKFLEVCTWVDQIAALNDSKTRKTTSETVRAVLDSLSEKKKSSP

SEQ ID NO: 505 - protein, 354 aa, Artificial Sequence
  Synthesized
MNTKYNKEFLLYLAGFVDSDGSIYATIAPKQQLKFKHQLQLVFVVAQKTRRRWFLDKLVDEIGVGYVHDYGPSSYYRLSQIKPLHNFLTQLQPFLKLKQKQANLVLKIIEQLPSAKESPDKFLEVCTWVDQIAALNDSKTRKTTSETVRAVLDSLPGSVGGLSPSQASSAASSASSSPGSGISEALRAGAGSGTGYNKEFLLYLAGFVDGDGSICASIRPCQVAKFKHALELRFTVGQKTQRRWFLDKLVDEIGVGYVYDLGSVSQYTLSQIKPLHNFLTQLQPFLKLKQKQANLVLKIIEQLPSAKESPDKFLEVCTWVDQIAALNDSKTRKTTSETVRAVLDSLSEKKKSSP

SEQ ID NO: 506 - protein, 354 aa, Artificial Sequence
  Synthesized
MNTKYNKEFLLYLAGFVDSDGSIYATIAPKQQLKFKHQLQLVFVVAQSTRRRWFLDKLVDEIGVGYVHDYGRASYYRLSQIKPLHNFLTQLQPFLKLKQKQANLVLKIIEQLPSAKESPDKFLEVCTWVDQIAALNDSKTRKTTSETVRAVLDSLPGSVGGLSPSQASSAASSASSSPGSGISEALRAGAGSGTGYNKEFLLYLAGFVDGDGSICASIRPCQVAKFKHALELRFTVGQKTQRRWFLDKLVDEIGVGYVYDLGSVSQYTLSQIKPLHNFLTQLQPFLKLKQKQANLVLKIIEQLPSAKESPDKFLEVCTWVDQIAALNDSKTRKTTSETVRAVLDSLSEKKKSSP

SEQ ID NO: 507 - protein, 354 aa, Artificial Sequence
  Synthesized
MNTKYNKEFLLYLAGFVDSDGSIYATIAPKQQLKFKHQLQLVFVVAQLTRRRWFLDKLVDEIGVGYVHDYGRASYYRLSQIKPLHNFLTQLQPFLKLKQKQANLVLKIIEQLPSAKESPDKFLEVCTWVDQIAALNDSRTRKTTSETVRAVLDSLPGSVGGLSPSQASSAASSASSSPGSGISEALRAGAGSGTGYNKEFLLYLAGFVDGDGSICASIRPCQVAKFKHALELRFTVGQKTQRRWFLDKLVDEIGVGYVYDLGSVSQYTLSQIKPLHNFLTQLQPFLKLKQKQANLVLKIIEQLPSAKESPDKFLEVCTWVDQIAALNDSKTRKTTSETVRAVLDSLSEKKKSSP

SEQ ID NO: 508 - protein, 354 aa, Artificial Sequence
  Synthesized
MNTKYNKEFLLYLAGFVDSDGSIYATIAPKQQLKFKHQLQLVFVVAQLTRRRWFLDKLVDEIGVGYVHDYRACSYYRLSQIKPLHNFLTQLQPFLKLKQKQANLVLKIIEQLPSAKESPDKFLEVCTWVDQIAALNDSRTRKTTSETVRAVLDSLPGSVGGLSPSQASSAASSASSSPGSGISEALRAGAGSGTGYNKEFLLYLAGFVDGDGSICASIRPCQVAKFKHALELRFTVGQKTQRRWFLDKLVDEIGVGYVYDLGSVSQYTLSQIKPLHNFLTQLQPFLKLKQKQANLVLKIIEQLPSAKESPDKFLEVCTWVDQIAALNDSKTRKTTSETVRAVLDSLSEKKKSSP

SEQ ID NO: 509 - protein, 354 aa, Artificial Sequence
  Synthesized
MNTKYNKEFLLYLAGFVDSDGSIYATIAPKQQLKFKHQLQLVFVVAQKTRRRWFLDKLVDEIGVGYVHDYRQASYYRLSEIKPLHNFLTQLQPFLKLKQKQANLVLKIIEQLPSAKESPDKFLEVCTWVDQIAALNDSKTRKTTSETVRAVLDSLPGSVGGLSPSQASSAASSASSSPGSGISEALRAGAGSGTGYNKEFLLYLAGFVDGDGSICASIRPCQVAKFKHALELRFTVGQKTQRRWFLDKLVDEIGVGYVYDLGSVSQYTLSQIKPLHNFLTQLQPFLKLKQKQANLVLKIIEQLPSAKESPDKFLEVCTWVDQIAALNDSKTRKTTSETVRAVLDSLSEKKKSSP

SEQ ID NO: 510 - protein, 354 aa, Artificial Sequence
  Synthesized
MNTKYNKEFLLYLAGFVDSDGSIYATIAPKQQLKFKHQLQLVFVVAQKTQRRWFLDKLVDEIGVGYVHDYGKAAYYRLSQIKPLHNFLTQLQPFLKLKQKQANLVLKIIEQLPSAKESPDKFLEVCTWVDQIAALNDSKTRKTTSETVRAVLDSLPGSVGGLSPSQASSAASSASSSPGSGISEALRAGAGSGTGYNKEFLLYLAGFVDGDGSICASIRPCQVAKFKHALELRFTVGQKTQRRWFLDKLVDEIGVGYVYDLGSVSQYTLSQIKPLHNFLTQLQPFLKLKQKQANLVLKIIEQLPSAKESPDKFLEVCTWVDQIAALNDSKTRKTTSETVRAVLDSLSEKKKSSP

SEQ ID NO: 511 - protein, 354 aa, Artificial Sequence
  Synthesized
MNTKYNKEFLLYLAGFVDSDGSIYATIAPKQQLKFKHQLQLVFVVAQVTRRRWFLDKLVDEIGVGYVHDYGRASYYRLSQIKPLHNFLTQLQPFLKLKQKQANLVLKIIEQLPSAKESPDKFLEVCTWVDQIAALNDSKTRKTTSETVRAVLDSLPGSVGGLSPSQASSAASSASSSPGSGISEALRAGAGSGTGYNKEFLLYLAGFVDGDGSICASIRPCQVAKFKHALELRFTVGQKTQRRWFLDKLVDEIGVGYVYDLGSVSQYTLSQIKPLHNFLTQLQPFLKLKQKQANLVLKIIEQLPSAKESPDKFLEVCTWVDQIAALNDSKTRKTTSETVRAVLDSLSEKKKSSP

SEQ ID NO: 512 - protein, 354 aa, Artificial Sequence
  Synthesized
MNTKYNKEFLLYLAGFVDSDGSIYATIAPKQQLKFKHQLQLVFVVAQKTSRRWFLDKLVDEIGVGYVHDYGRASYYRLSQIKPLHNFLTQLQPFLKLKQKQANLVLKIIEQLPSAKESPDKFLEVCTWVDQIAALNDSRTRKTTSETVRAVLDSLPGSVGGLSPSQASSAASSASSSPGSGISEALRAGAGSGTGYNKEFLLYLAGFVDGDGSICASIRPCQVAKFKHALELRFTVGQKTQRRWFLDKLVDEIGVGYVYDLGSVSQYTLSQIKPLHNFLTQLQPFLKLKQKQANLVLKIIEQLPSAKESPDKFLEVCTWVDQIAALNDSKTRKTTSETVRAVLDSLSEKKKSSP

SEQ ID NO: 513 - protein, 354 aa, Artificial Sequence
  Synthesized
MNTKYNKEFLLYLAGFVDSDGSIYATIAPKQQLKFKHQLQLVFVVAQLTKRRWFLDKLVDEIGVGYVHDYNRASYYRLSQIKPLHNFLTQLQPFLKLKQKQANLVLKIIEQLPSAKESPDKFLEVCTWVDQIAALNDSRTRKTTSETVRAVLDSLPGSVGGLSPSQASSAASSASSSPGSGISEALRAGAGSGTGYNKEFLLYLAGFVDGDGSICASIRPCQVAKFKHALELRFTVGQKTQRRWFLDKLVDEIGVGYVYDLGSVSQYTLSQIKPLHNFLTQLQPFLKLKQKQANLVLKIIEQLPSAKESPDKFLEVCTWVDQIAALNDSKTRKTTSETVRAVLDSLSEKKKSSP

SEQ ID NO: 514 - protein, 354 aa, Artificial Sequence
  Synthesized
MNTKYNKEFLLYLAGFVDSDGSIYATIAPKQQLKFKHQLQLVFVVAQKTARRWFLDKLVDEIGVGYVHDYGRASYYRLSQIKPLHNFLTQLQPFLKLKQKQANLVLKIIEQLPSAKESPDKFLEVCTWVDQIAALNDSKTRKTTSETVRAVLDSLPGSVGGLSPSQASSAASSASSSPGSGISEALRAGAGSGTGYNKEFLLYLAGFVDGDGSICASIRPCQVAKFKHALELRFTVGQKTQRRWFLDKLVDEIGVGYVYDLGSVSQYTLSQIKPLHNFLTQLQPFLKLKQKQANLVLKIIEQLPSAKESPDKFLEVCTWVDQIAALNDSKTRKTTSETVRAVLDSLSEKKKSSP

SEQ ID NO: 515 - protein, 354 aa, Artificial Sequence
  Synthesized
MNTKYNKEFLLYLAGFVDSDGSIYATIAPKQQLKFKHQLQLVFVVAQLTRRRWFLDKLVDEIGVGYVHDYGRASYYRLSQIKPLHNFLTQLQPFLKLKQKQANLVLKIIEQLPSAKESPDKFLEVCTWVDQIAALNDSKTRKTTSETVRAVLDSLPGSVGGLSPSQASSAASSASSSPGSGISEALRAGAGSGTGYNKEFLLYLAGFVDGDGSICASIRPCQVAKFKHALELRFTVGQKTQRRWFLDKLVDEIGVGYVYDLGSVSQYTLSQIKPLHNFLTQLQPFLKLKQKQANLVLKIIEQLPSAKESPDKFLEVCTWVDQIAALNDSKTRKTTSETVRAVLDSLSEKKKSSP

SEQ ID NO: 516 - protein, 354 aa, Artificial Sequence
  Synthesized
MNTKYNKEFLLYLAGFVDSDGSIYATIAPKQQLKFKHQLQLVFVVAQKTERRWFLDKLVDEIGVGYVHDYGRASYYRLSEIKPLHNFLTQLQPFLKLKQKQANLVLKIIEQLPSAKESPDKFLEVCTWVDQIAALNDSKTRKTTSETVRAVLDSLPGSVGGLSPSQASSAASSASSSPGSGISEALRAGAGSGTGYNKEFLLYLAGFVDGDGSICASIRPCQVAKFKHALELRFTVGQKTQRRWFLDKLVDEIGVGYVYDLGSVSQYTLSQIKPLHNFLTQLQPFLKLKQKQANLVLKIIEQLPSAKESPDKFLEVCTWVDQIAALNDSKTRKTTSETVRAVLDSLSEKKKSSP

SEQ ID NO: 517 - protein, 354 aa, Artificial Sequence
  Synthesized
MNTKYNKEFLLYLAGFVDSDGSIYATIAPKQQLKFKHQLQLVFVVAQKTKRRWFLDKLVDEIGVGYVHDYHRASYYRLSQIKPLHNFLTQLQPFLKLKQKQANLVLKIIEQLPSAKESPDKFLEVCTWVDQIAALNDSRTRKTTSETVRAVLDSLPGSVGGLSPSQASSAASSASSSPGSGISEALRAGAGSGTGYNKEFLLYLAGFVDGDGSICASIRPCQVAKFKHALELRFTVGQKTQRRWFLDKLVDEIGVGYVYDLGSVSQYTLSQIKPLHNFLTQLQPFLKLKQKQANLVLKIIEQLPSAKESPDKFLEVCTWVDQIAALNDSKTRKTTSETVRAVLDSLSEKKKSSP

SEQ ID NO: 518 - protein, 354 aa, Artificial Sequence
  Synthesized
MNTKYNKEFLLYLAGFVDSDGSIYATIAPKQQLKFKHQLQLVFVVAQKTRRRWFLDKLVDEIGVGYVHDYATASYYRLSQIKPLHNFLTQLQPFLKLKQKQANLVLKIIEQLPSAKESPDKFLEVCTWVDQIAALNDSRTRKTTSETVRAVLDSLPGSVGGLSPSQASSAASSASSSPGSGISEALRAGAGSGTGYNKEFLLYLAGFVDGDGSICASIRPCQVAKFKHALELRFTVGQKTQRRWFLDKLVDEIGVGYVYDLGSVSQYTLSQIKPLHNFLTQLQPFLKLKQKQANLVLKIIEQLPSAKESPDKFLEVCTWVDQIAALNDSKTRKTTSETVRAVLDSLSEKKKSSP

SEQ ID NO: 519 - protein, 354 aa, Artificial Sequence
  Synthesized
MNTKYNKEFLLYLAGFVDSDGSIYATIAPKQQLKFKHQLQLVFVVAQKTRRRWFLDKLVDEIGVGYVHDYTGTSYYRLSQIKPLHNFLTQLQPFLKLKQKQANLVLKIIEQLPSAKESPDKFLEVCTWVDQIAALNDSRTRKTTSETVRAVLDSLPGSVGGLSPSQASSAASSASSSPGSGISEALRAGAGSGTGYNKEFLLYLAGFVDGDGSICASIRPCQVAKFKHALELRFTVGQKTQRRWFLDKLVDEIGVGYVYDLGSVSQYTLSQIKPLHNFLTQLQPFLKLKQKQANLVLKIIEQLPSAKESPDKFLEVCTWVDQIAALNDSKTRKTTSETVRAVLDSLSEKKKSSP

SEQ ID NO: 520 - protein, 354 aa, Artificial Sequence
  Synthesized
MNTKYNKEFLLYLAGFVDADGSIYATIAPKQQLKFKHQLQLVFVVAQLTRRRWFLDKLVDEIGVGYVHDYNKASYYRLSEIKPLHNFLTQLQPFLKLKQKQANLVLKIIEQLPSAKESPDKFLEVCTWVDQIAALNDSKTRKTTSETVRAVLDSLPGSVGGLSPSQASSAASSASSSPGSGISEALRAGAGSGTGYNKEFLLYLAGFVDGDGSICASIRPCQVAKFKHALELRFTVGQKTQRRWFLDKLVDEIGVGYVYDLGSVSQYTLSQIKPLHNFLTQLQPFLKLKQKQANLVLKIIEQLPSAKESPDKFLEVCTWVDQIAALNDSKTRKTTSETVRAVLDSLSEKKKSSP

SEQ ID NO: 521 - protein, 354 aa, Artificial Sequence; identical to SEQ ID NO: 509
  Synthesized

SEQ ID NO: 522 - protein, 354 aa, Artificial Sequence
  Synthesized
MNTKYNKEFLLYLAGFVDADGSIYATIAPKQQLKFKHQLQLVFVVAQGTRRRWFLDKLVDEIGVGYVHDYGRASYYRLSQIKPLHNFLTQLQPFLKLKQKQANLVLKIIEQLPSAKESPDKFLEVCTWVDQIAALNDSKTRKTTSETVRAVLDSLPGSVGGLSPSQASSAASSASSSPGSGISEALRAGAGSGTGYNKEFLLYLAGFVDGDGSICASIRPCQVAKFKHALELRFTVGQKTQRRWFLDKLVDEIGVGYVYDLGSVSQYTLSQIKPLHNFLTQLQPFLKLKQKQANLVLKIIEQLPSAKESPDKFLEVCTWVDQIAALNDSKTRKTTSETVRAVLDSLSEKKKSSP

SEQ ID NO: 523 - protein, 354 aa, Artificial Sequence; identical to SEQ ID NO: 425
  Synthesized

SEQ ID NO: 524 - protein, 354 aa, Artificial Sequence
  Synthesized
MNTKYNKEFLLYLAGFVDSDGSIYATIAPKQQLKFKHQLQLVFVVAQKTCRRWFLDKLVDEIGVGYVHDYARASYYRLSQIKPLHNFLTQLQPFLKLKQKQANLVLKIIEQLPSAKESPDKFLEVCTWVDQIAALNDSRTRKTTSETVRAVLDSLPGSVGGLSPSQASSAASSASSSPGSGISEALRAGAGSGTGYNKEFLLYLAGFVDGDGSICASIRPCQVAKFKHALELRFTVGQKTQRRWFLDKLVDEIGVGYVYDLGSVSQYTLSQIKPLHNFLTQLQPFLKLKQKQANLVLKIIEQLPSAKESPDKFLEVCTWVDQIAALNDSKTRKTTSETVRAVLDSLSEKKKSSP

SEQ ID NO: 525 - protein, 354 aa, Artificial Sequence
  Synthesized
MNTKYNKEFLLYLAGFVDSDGSIYATIAPKQQLKFKHQLQLVFVVAQSTVRRWFLDKLVDEIGVGYVHDYGRASYYRLSQIKPLHNFLTQLQPFLKLKQKQANLVLKIIEQLPSAKESPDKFLEVCTWVDQIAALNDSKTRKTTSETVRAVLDSLPGSVGGLSPSQASSAASSASSSPGSGISEALRAGAGSGTGYNKEFLLYLAGFVDGDGSICASIRPCQVAKFKHALELRFTVGQKTQRRWFLDKLVDEIGVGYVYDLGSVSQYTLSQIKPLHNFLTQLQPFLKLKQKQANLVLKIIEQLPSAKESPDKFLEVCTWVDQIAALNDSKTRKTTSETVRAVLDSLSEKKKSSP

SEQ ID NO: 526 - protein, 354 aa, Artificial Sequence
  Synthesized
MNTKYNKEFLLYLAGFVDADGSIYATIAPKQQLKFKHQLQLVFVVAQSTRRRWFLDKLVDEIGVGYVHDYGVATYYRLSEIKPLHNFLTQLQPFLKLKQKQANLVLKIIEQLPSAKESPDKFLEVCTWVDQIAALNDSKTRKTTSETVRAVLDSLPGSVGGLSPSQASSAASSASSSPGSGISEALRAGAGSGTGYNKEFLLYLAGFVDGDGSICASIRPCQVAKFKHALELRFTVGQKTQRRWFLDKLVDEIGVGYVYDLGSVSQYTLSQIKPLHNFLTQLQPFLKLKQKQANLVLKIIEQLPSAKESPDKFLEVCTWVDQIAALNDSKTRKTTSETVRAVLDSLSEKKKSSP

SEQ ID NO: 527 - protein, 354 aa, Artificial Sequence
  Synthesized
MNTKYNKEFLLYLAGFVDADGSIYATIAPKQQLKFKHQLQLVFVVAQKTQRRWFLDKLVDEIGVGYVHDYGRASYYRLSEIKPLHNFLTQLQPFLKLKQKQANLVLKIIEQLPSAKESPDKFLEVCTWVDQIAALNDSKTRKTTSETVRAVLDSLPGSVGGLSPSQASSAASSASSSPGSGISEALRAGAGSGTGYNKEFLLYLAGFVDGDGSICASIRPCQVAKFKHALELRFTVGQKTQRRWFLDKLVDEIGVGYVYDLGSVSQYTLSQIKPLHNFLTQLQPFLKLKQKQANLVLKIIEQLPSAKESPDKFLEVCTWVDQIAALNDSKTRKTTSETVRAVLDSLSEKKKSSP

SEQ ID NO: 528 - protein, 354 aa, Artificial Sequence
  Synthesized
MNTKYNKEFLLYLAGFVDSDGSIYATIAPKQQLKFKHQLQLVFVVAQNTRRRWFLDKLVDEIGVGYVHDYGRASYYRLSQIKPLHNFLTQLQPFLKLKQKQANLVLKIIEQLPSAKESPDKFLEVCTWVDQIAALNDSRTRKTTSETVRAVLDSLPGSVGGLSPSQASSAASSASSSPGSGISEALRAGAGSGTGYNKEFLLYLAGFVDGDGSICASIRPCQVAKFKHALELRFTVGQKTQRRWFLDKLVDEIGVGYVYDLGSVSQYTLSQIKPLHNFLTQLQPFLKLKQKQANLVLKIIEQLPSAKESPDKFLEVCTWVDQIAALNDSKTRKTTSETVRAVLDSLSEKKKSSP

SEQ ID NO: 529 - protein, 354 aa, Artificial Sequence; identical to SEQ ID NO: 406
  Synthesized

SEQ ID NO: 530 - protein, 42 aa, Artificial Sequence
  Synthesized
SLPGSVGGLSPSQASSAASSASSSPGSGISEALRAGAGSGTG

1. An engineered I-CreI derived meganuclease that binds and cleaves a recognition sequence comprising a center sequence selected from the group consisting of ACAA, ACAG, ACAT, ACGA, ACGC, ACGG, ACGT, ATAA, ATAG, ATAT, ATGA, ATGG, TTGG, GCAA, GCAT, GCGA, GCAG, TCAA, or TTAA, wherein said engineered meganuclease comprises a first subunit and a second subunit, wherein said first subunit and said second subunit each comprise an amino acid sequence derived from SEQ ID NO: 1, and wherein said first subunit and said second subunit each comprise a substitution at one or more positions corresponding to positions 48, 50, 71, 72, 73, 73B, and 74 of SEQ ID NO: 1.

2. The engineered meganuclease of claim 1, wherein said first subunit comprises one or more of the following residues:
(a) an A, C, D, G, H, I, K, L, N, Q, R, S, or T residue at a position corresponding to position 48 of SEQ ID NO: 1;
(b) an A, C, D, E, G, I, K, L, N, Q, R, S, T, V, or W residue at a position corresponding to position 50 of SEQ ID NO: 1;
(c) an A, C, G, H, I, K, N, P, R, S, or T residue at a position corresponding to position 71 of SEQ ID NO: 1;
(d) an A, D, G, H, K, L, M, N, P, Q, R, S, T, or V residue at a position corresponding to position 72 of SEQ ID NO: 1;
(e) an A, C, G, I, S, T, or V residue at a position corresponding to position 73 of SEQ ID NO: 1; and
(f) an A, C, T, or S residue at a position corresponding to position 74 of SEQ ID NO: 1.

3. The engineered meganuclease of claim 1 or claim 2, wherein said second subunit comprises one or more of the following residues
(a) an A, C, G, H, I, K, L, N, Q, R, S, or T residue at a position corresponding to position 48 of SEQ ID NO: 1;
(b) an A, C, E, G, H, I, K, N, P, Q, R, S, T, or V residue at a position corresponding to position 50 of SEQ ID NO: 1;
(c) an A, D, E, G, H, I, K, N, P, Q, R, S, T, or Y residue at a position corresponding to position 71 of SEQ ID NO: 1;
(d) an A, C, E, G, H, I, K, M, N, P, Q, R, S, T, V, or Y residue at a position corresponding to position 72 of SEQ ID NO: 1;
(e) an A, C, G, H, I, R, S, T, or V residue at a position corresponding to position 73 of SEQ ID NO: 1; and
(f) an A, C, S, or T residue at a position corresponding to position 74 of SEQ ID NO: 1.

4. The engineered meganuclease of any one of claims 1-3, wherein said center sequence consists of ACAA, ACAG, ACAT, ACGC, ACGG, or ACGT, wherein said first subunit comprises one or more of the following residues
(a) an A, C, G, H, I, K, L, N, Q, or S residue at a position corresponding to position 48 of SEQ ID NO: 1;
(b) an A, C, K, Q, R, S, T, V, or W residue at a position corresponding to position 50 of SEQ ID NO: 1;
(c) an A, G, P, or R residue at a position corresponding to position 71 of SEQ ID NO: 1;
(d) an H, K, P, Q, R, or T residue at a position corresponding to position 72 of SEQ ID NO: 1;
(e) an A, C, G, or V residue at a position corresponding to position 73 of SEQ ID NO: 1; and
(f) a S residue at a position corresponding to position 74 of SEQ ID NO: 1.

5. The engineered meganuclease of any one of claims 1-3, wherein said center sequence consists of ATAA, ATAG, ATAT, ATGA, ATGG, wherein said first subunit comprises one or more of the following residues:
(a) an A, C, D, G, H, K, L, N, Q, S, or T residue at a position corresponding to position 48 of SEQ ID NO: 1;
(b) a C, D, E, G, I, K, N, R, S, T, or V residue at a position corresponding to position 50 of SEQ ID NO: 1;
(c) a G, H, I, K, N, R, or S residue at a position corresponding to position 71 of SEQ ID NO: 1;
(d) an A, G, H, K, L, N, P, Q, R, S, or T residue at a position corresponding to position 72 of SEQ ID NO: 1;
(e) an A, C, S, or T residue at a position corresponding to position 73 of SEQ ID NO: 1; and
(f) an A, C, or S residue at a position corresponding to position 74 of SEQ ID NO: 1.

6. The engineered meganuclease of any one of claims 1-3, wherein said center sequence consists of GCAA, GCAT, GCGA, or GCAG, wherein said first subunit comprises one or more of the following residues:
(a) an A, H, K, or R residue at a position corresponding to position 48 of SEQ ID NO: 1;
(b) a C, K, L, Q, R, S, T, or V residue at a position corresponding to position 50 of SEQ ID NO: 1;
(c) an A, G, H, N, R, S, or T residue at a position corresponding to position 71 of SEQ ID NO: 1;
(d) an A, G, H, M, N, P, Q, R, S, T, or V residue at a position corresponding to position 72 of SEQ ID NO: 1;
(e) an A, C, I, T, or V residue at a position corresponding to position 73 of SEQ ID NO: 1; and
(f) an A or S residue at a position corresponding to position 74 of SEQ ID NO: 1.

7. The engineered meganuclease of any one of claims 1-3, wherein said center sequence consists of TTGG or TTAA, wherein said first subunit comprises one or more of the following residues:
(a) a K, N, R, or S residue at a position corresponding to position 48 of SEQ ID NO: 1;
(b) a C, E, K, R, S, T, or V residue at a position corresponding to position 50 of SEQ ID NO: 1;
(c) an A, G, K, N, R, or S residue at a position corresponding to position 71 of SEQ ID NO: 1;
(d) an A, D, H, K, N, Q, R, S, or T residue at a position corresponding to position 72 of SEQ ID NO: 1;
(e) an I or V residue at a position corresponding to position 73 of SEQ ID NO: 1; and
(f) an A, S or T residue at a position corresponding to position 74 of SEQ ID NO: 1.

8. The engineered meganuclease of any one of claims 1-3, wherein said center sequence consists of TCAA, wherein said first subunit comprises one or more of the following residues:
(a) an A, G, H, K, N, Q, R, or S residue at a position corresponding to position 48 of SEQ ID NO: 1;
(b) a C, R, S, or T residue at a position corresponding to position 50 of SEQ ID NO: 1;
(c) a G, R, S, or T residue at a position corresponding to position 71 of SEQ ID NO: 1;
(d) a G, H, P, R, S, or T residue at a position corresponding to position 72 of SEQ ID NO: 1;
(e) an I or V residue at a position corresponding to position 73 of SEQ ID NO: 1; and
(f) an A or S residue at a position corresponding to position 74 of SEQ ID NO: 1.

9. The engineered meganuclease of any one of claims 1-4, wherein said center sequence consists of ACAA, ACAG, ACAT, ACGC, ACGG, or ACGT, wherein said second subunit comprises one or more of the following residues
(a) an A, C, G, H, K, L, N, Q, R, S, or T residue at a position corresponding to position 48 of SEQ ID NO: 1;
(b) an A, C, G, H, K, L, N, Q, R, S, or T residue at a position corresponding to position 50 of SEQ ID NO: 1;
(c) an A, D, E, G, H, K, N, P, R, S, or T residue at a position corresponding to position 71 of SEQ ID NO: 1;
(d) an A, G, H, K, M, N, P, P, Q, R, S, or T residue at a position corresponding to position 72 of SEQ ID NO: 1;
(e) an A, C, G, H, I, R, S, T, or V residue at a position corresponding to position 73 of SEQ ID NO: 1;
(f) optionally an R residue at a position directly following position corresponding to position 73 of SEQ ID NO: 1 (73B); and
(g) an A, C, S, or T residue at a position corresponding to position 74 of SEQ ID NO: 1.

10. The engineered meganuclease of any one of claims 1-3 or claim 5, wherein said center sequence consists of ATAA, ATAG, ATAT, ATGA, or ATGG, wherein said second subunit comprises one or more of the following residues:
(a) an A, C, G, H, K, N, Q, R, S, or T residue at a position corresponding to position 48 of SEQ ID NO: 1;
(b) an A, C, E, I, K, N, Q, R, S, or T residue at a position corresponding to position 50 of SEQ ID NO: 1;
(c) an A, C, E, I, K, N, Q, R, S, or T residue at a position corresponding to position 71 of SEQ ID NO: 1;
(d) an A, G, H, K, N, Q, R, S, T, V, or Y residue at a position corresponding to position 72 of SEQ ID NO: 1;
(e) an A, C, G, H, I, R, S, or V residue at a position corresponding to position 73 of SEQ ID NO: 1;
(f) optionally an R residue at a position directly following position corresponding to position 73 of SEQ ID NO: 1 (73B); and
(g) an A, C, S, or T residue at a position corresponding to position 74 of SEQ ID NO: 1.

11. The engineered meganuclease of any one of claims 1-3 or claim 6, wherein said center sequence consists of GCAA, GCAT, GCGA, or GCAG, wherein said second subunit comprises one or more of the following residues:
(a) an A, C, G, H, I, K, L, N, Q, R, S, or T residue at a position corresponding to position 48 of SEQ ID NO: 1;
(b) a C, E, H, K, Q, R, S, T, or V residue at a position corresponding to position 50 of SEQ ID NO: 1;
(c) an A, G, H, K, R, S, T, or Y residue at a position corresponding to position 71 of SEQ ID NO: 1;
(d) an A, C, E, G, H, K, N, Q, R, S, T, or Y residue at a position corresponding to position 72 of SEQ ID NO: 1;
(e) an A, C, G, H, I, R, S, or V residue at a position corresponding to position 73 of SEQ ID NO: 1; and
(f) an A, S, or T residue at a position corresponding to position 74 of SEQ ID NO: 1.

12. The engineered meganuclease of any one of claims 1-3 or claim 7, wherein said center sequence consists of TTGG or TTAA, wherein said second subunit comprises one or more of the following residues:
(a) an A, K, S, or T residue at a position corresponding to position 48 of SEQ ID NO: 1;
(b) a C, E, K, R, or T residue at a position corresponding to position 50 of SEQ ID NO: 1;
(c) an A, D, G, K, Q, R, S, or T residue at a position corresponding to position 71 of SEQ ID NO: 1;
(d) a G, I, R, S, T, or V residue at a position corresponding to position 72 of SEQ ID NO: 1;
(e) an I, R, or V residue at a position corresponding to position 73 of SEQ ID NO: 1; and
(f) an A, S, or T residue at a position corresponding to position 74 of SEQ ID NO: 1.

13. The engineered meganuclease of any one of claims 1-3 or claim 8, wherein said center sequence consists of TCAA, wherein said second subunit comprises one or more of the following residues:
(a) a K or S residue at a position corresponding to position 48 of SEQ ID NO: 1;
(b) a C, K, R, or T residue at a position corresponding to position 50 of SEQ ID NO: 1;
(c) a G, R, or T residue at a position corresponding to position 71 of SEQ ID NO: 1;
(d) a G, P, R, S, or T residue at a position corresponding to position 72 of SEQ ID NO: 1;
(e) a I or V residue at a position corresponding to position 73 of SEQ ID NO: 1; and
(f) an A, S, or T residue at a position corresponding to position 74 of SEQ ID NO: 1.

14. The engineered meganuclease of claim 1, wherein:
(a) said center sequence is ACAA and said first subunit comprises residues corresponding to residues 48, 50, 71, 72, 73, and 74 of any one of SEQ ID NOs: 11-33,
(b) said center sequence is ACAG and said first subunit comprises residues corresponding to residues 48, 50, 71, 72, 73, and 74 of any one of SEQ ID NOs: 36-43,
(c) said center sequence is ACAT and said first subunit comprises residues corresponding to residues 48, 50, 71, 72, 73, and 74 of any one of SEQ ID NOs: 46-67,
(d) said center sequence is ACGA and said first subunit comprises residues corresponding to residues 48, 50, 71, 72, 73, and 74 of any one of SEQ ID NOs: 70-89,
(e) said center sequence is ACGC and said first subunit comprises residues corresponding to residues 48, 50, 71, 72, 73, and 74 of any one of SEQ ID NOs: 92-118,
(f) said center sequence is ACGG and said first subunit comprises residues corresponding to residues 48, 50, 71, 72, 73, and 74 of any one of SEQ ID NOs: 121-135,
(g) said center sequence is ACGT and said first subunit comprises residues corresponding to residues 48, 50, 71, 72, 73, and 74 of any one of SEQ ID NOs: 138-156,
(h) said center sequence is ATAA and said first subunit comprises residues corresponding to residues 48, 50, 71, 72, 73, and 74 of any one of SEQ ID NOs: 159-183,
(i) said center sequence is ATAG and said first subunit comprises residues corresponding to residues 48, 50, 71, 72, 73, and 74 of any one of SEQ ID NOs: 186-199,
(j) said center sequence is ATAT and said first subunit comprises residues corresponding to residues 48, 50, 71, 72, 73, and 74 of any one of SEQ ID NOs: 202-219,
(k) said center sequence is ATGA and said first subunit comprises residues corresponding to residues 48, 50, 71, 72, 73, and 74 of any one of SEQ ID NOs: 222-243,
(l) said center sequence is ATGG and said first subunit comprises residues corresponding to residues 48, 50, 71, 72, 73, and 74 of any one of SEQ ID NOs: 246-247,
(m) said center sequence is TTGG and said first subunit comprises residues corresponding to residues 48, 50, 71, 72, 73, and 74 of any one of SEQ ID NOs: 250-266,
(n) said center sequence is GCAA and said first subunit comprises residues corresponding to residues 48, 50, 71, 72, 73, and 74 of any one of SEQ ID NOs: 269-291,
(o) said center sequence is GCAT and said first subunit comprises residues corresponding to residues 48, 50, 71, 72, 73, and 74 of any one of SEQ ID NOs: 294-313,
(p) said center sequence is GCGA and said first subunit comprises residues corresponding to residues 48, 50, 71, 72, 73, and 74 of any one of SEQ ID NOs: 316-325,
(q) said center sequence is GCAG and said first subunit comprises residues corresponding to residues 48, 50, 71, 72, 73, and 74 of any one of SEQ ID NOs: 328-330,
(r) said center sequence is TCAA and said first subunit comprises residues corresponding to residues 48, 50, 71, 72, 73, and 74 of any one of SEQ ID NOs: 333-340, or
(s) said center sequence is TTAA and said first subunit comprises residues corresponding to residues 48, 50, 71, 72, 73, and 74 of any one of SEQ ID NOs: 343-357.

15. The engineered meganuclease of any one of claims 1-14, wherein:
(a) said center sequence is ACAA and said second subunit comprises residues corresponding to residues 48, 50, 71, 72, 73, and 74 of any one of SEQ ID NOs: 11-33,
(b) said center sequence is ACAG and said second subunit comprises residues corresponding to residues 48, 50, 71, 72, 73, and 74 of any one of SEQ ID NOs: 36-43,
(c) said center sequence is ACAT and said second subunit comprises residues corresponding to residues 48, 50, 71, 72, 73, and 74 of any one of SEQ ID NOs: 46-67,
(d) said center sequence is ACGA and said second subunit comprises residues corresponding to residues 48, 50, 71, 72, 73, and 74 of any one of SEQ ID NOs: 70-89,
(e) said center sequence is ACGC and said second subunit comprises residues corresponding to residues 48, 50, 71, 72, 73, and 74 of any one of SEQ ID NOs: 92-118,
(f) said center sequence is ACGG and said second subunit comprises residues corresponding to residues 48, 50, 71, 72, 73, and 74 of any one of SEQ ID NOs: 121-135,
(g) said center sequence is ACGT and said second subunit comprises residues corresponding to residues 48, 50, 71, 72, 73, and 74 of any one of SEQ ID NOs: 138-156,
(h) said center sequence is ATAA and said second subunit comprises residues corresponding to residues 48, 50, 71, 72, 73, and 74 of any one of SEQ ID NOs: 159-183,
(i) said center sequence is ATAG and said second subunit comprises residues corresponding to residues 48, 50, 71, 72, 73, and 74 of any one of SEQ ID NOs: 186-199,
(j) said center sequence is ATAT and said second subunit comprises residues corresponding to residues 48, 50, 71, 72, 73, and 74 of any one of SEQ ID NOs: 202-219,
(k) said center sequence is ATGA and said second subunit comprises residues corresponding to residues 48, 50, 71, 72, 73, and 74 of any one of SEQ ID NOs: 222-243,
(l) said center sequence is ATGG and said second subunit comprises residues corresponding to residues 48, 50, 71, 72, 73, and 74 of any one of SEQ ID NOs: 246-247,
(m) said center sequence is TTGG and said second subunit comprises residues corresponding to residues 48, 50, 71, 72, 73, and 74 of any one of SEQ ID NOs: 250-266,
(n) said center sequence is GCAA and said second subunit comprises residues corresponding to residues 48, 50, 71, 72, 73, and 74 of any one of SEQ ID NOs: 269-291,
(o) said center sequence is GCAT and said second subunit comprises residues corresponding to residues 48, 50, 71, 72, 73, and 74 of any one of SEQ ID NOs: 294-313,
(p) said center sequence is GCGA and said second subunit comprises residues corresponding to residues 48, 50, 71, 72, 73, and 74 of any one of SEQ ID NOs: 316-325,
(q) said center sequence is GCAG and said second subunit comprises residues corresponding to residues 48, 50, 71, 72, 73, and 74 of any one of SEQ ID NOs: 328-330,
(r) said center sequence is TCAA and said second subunit comprises residues corresponding to residues 48, 50, 71, 72, 73, and 74 of any one of SEQ ID NOs: 333-340, or
(s) said center sequence is TTAA and said second subunit comprises residues corresponding to residues 48, 50, 71, 72, 73, and 74 of any one of SEQ ID NOs: 343-357.

16. A method for cleaving double-stranded DNA at a target site comprising a meganuclease recognition sequence, wherein said recognition sequence comprises a center sequence consisting of ACAA, ACAG, ACAT, ACGA, ACGC, ACGG, ACGT, ATAA, ATAG, ATAT, ATGA, ATGG, TTGG, GCAA, GCAT, GCGA, GCAG, TCAA, or TTAA, wherein
said method comprises contacting said double-stranded DNA having said target site with an engineered meganuclease of any one of claims 1-15, wherein said engineered meganuclease binds and cleaves said recognition sequence.

17. A method for increasing the cleavage activity of an engineered meganuclease that binds and cleaves a recognition sequence comprising a center sequence consisting of ACAA, ACAG, ACAT, ACGA, ACGC, ACGG, ACGT, ATAA, ATAG, ATAT, ATGA, ATGG, TTGG, GCAA, GCAT, GCGA, GCAG, TCAA, or TTAA, wherein said engineered meganuclease comprises a first subunit and a second subunit, wherein said first subunit and said second subunit each comprise an amino acid sequence derived from SEQ ID NO: 1, said method comprising modifying each of said first subunit and said second subunit at one or more positions corresponding to positions 48, 50, 71, 72, 73, and 74 of SEQ ID NO: 1, wherein said modified nuclease has increased cleavage activity when compared to a control engineered meganuclease.

18. The method of claim 17, wherein said modifying step comprises modifying said first subunit to comprise one or more of the following residues:
(a) an A, C, D, G, H, I, K, L, N, Q, R, S, or T residue at a position corresponding to position 48 of SEQ ID NO: 1;
(b) an A, C, D, E, G, I, K, L, N, Q, R, S, T, V, or W residue at a position corresponding to position 50 of SEQ ID NO: 1;
(c) an A, C, G, H, I, K, N, P, R, S, or T residue at a position corresponding to position 71 of SEQ ID NO: 1;
(d) an A, D, G, H, K, L, M, N, P, Q, R, S, T, or V residue at a position corresponding to position 72 of SEQ ID NO: 1;
(e) an A, C, G, I, S, T, or V residue at a position corresponding to position 73 of SEQ ID NO: 1; and
(f) an A, C, T, or S residue at a position corresponding to position 74 of SEQ ID NO: 1.

19. The method of claim 17 or claim 18, wherein said modifying step comprises modifying said second subunit to comprise one or more of the following residues:
(a) an A, C, G, H, I, K, L, N, Q, R, S, or T residue at a position corresponding to position 48 of SEQ ID NO: 1;
(b) an A, C, E, G, H, I, K, N, P, Q, R, S, T, or V residue at a position corresponding to position 50 of SEQ ID NO: 1;
(c) an A, D, E, G, H, I, K, N, P, Q, R, S, T, or Y residue at a position corresponding to position 71 of SEQ ID NO: 1;
(d) an A, C, E, G, H, I, K, M, N, P, Q, R, S, T, V, or Y residue at a position corresponding to position 72 of SEQ ID NO: 1;
(e) an A, C, G, H, I, R, S, T, or V residue at a position corresponding to position 73 of SEQ ID NO: 1; and
(f) an A, C, S, or T residue at a position corresponding to position 74 of SEQ ID NO: 1.

20. The method of any one of claims 17-19, wherein said center sequence consists of ACAA, ACAG, ACAT, ACGC, ACGG, or ACGT, and wherein said modifying step comprises modifying said first subunit to comprise one or more of the following residues:
(a) an A, C, G, H, I, K, L, N, Q, or S residue at a position corresponding to position 48 of SEQ ID NO: 1;
(b) an A, C, K, Q, R, S, T, V, or W residue at a position corresponding to position 50 of SEQ ID NO: 1;
(c) an A, G, P, or R residue at a position corresponding to position 71 of SEQ ID NO: 1;
(d) an H, K, P, Q, R, or T residue at a position corresponding to position 72 of SEQ ID NO: 1;
(e) an A, C, G, or V residue at a position corresponding to position 73 of SEQ ID NO: 1; and
(f) a S residue at a position corresponding to position 74 of SEQ ID NO: 1.

21. The method of any one of claims 17-19, wherein said center sequence consists of ATAA, ATAG, ATAT, ATGA, or ATGG, and wherein said modifying step comprises modifying said first subunit to comprise one or more of the following residues:
(a) an A, C, D, G, H, K, L, N, Q, S, or T residue at a position corresponding to position 48 of SEQ ID NO: 1;
(b) a C, D, E, G, I, K, N, R, S, T, or V residue at a position corresponding to position 50 of SEQ ID NO: 1;
(c) a G, H, I, K, N, R, or S residue at a position corresponding to position 71 of SEQ ID NO: 1;
(d) an A, G, H, K, L, N, P, Q, R, S, or T residue at a position corresponding to position 72 of SEQ ID NO: 1;
(e) an A, C, S, or T residue at a position corresponding to position 73 of SEQ ID NO: 1; and
(f) an A, C, or S residue at a position corresponding to position 74 of SEQ ID NO: 1.

22. The method of any one of claims 17-19, wherein said center sequence consists of GCAA, GCAT, GCGA, or GCAG, and wherein said modifying step comprises modifying said first subunit to comprise one or more of the following residues:
(a) an A, H, K, or R residue at a position corresponding to position 48 of SEQ ID NO: 1;
(b) a C, K, L, Q, R, S, T, or V residue at a position corresponding to position 50 of SEQ ID NO: 1;
(c) an A, G, H, N, R, S, or T residue at a position corresponding to position 71 of SEQ ID NO: 1;
(d) an A, G, H, M, N, P, Q, R, S, T, or V residue at a position corresponding to position 72 of SEQ ID NO: 1;
(e) an A, C, I, T, or V residue at a position corresponding to position 73 of SEQ ID NO: 1; and
(f) an A or S residue at a position corresponding to position 74 of SEQ ID NO: 1.

23. The method of any one of claims 17-19, wherein said center sequence consists of TTGG or TTAA, and wherein said modifying step comprises modifying said first subunit to comprise one or more of the following residues:
(a) a K, N, R, or S residue at a position corresponding to position 48 of SEQ ID NO: 1;
(b) a C, E, K, R, S, T, or V residue at a position corresponding to position 50 of SEQ ID NO: 1;
(c) an A, G, K, N, R, or S residue at a position corresponding to position 71 of SEQ ID NO: 1;
(d) an A, D, H, K, N, Q, R, S, or T residue at a position corresponding to position 72 of SEQ ID NO: 1;
(e) an I or V residue at a position corresponding to position 73 of SEQ ID NO: 1; and
(f) an A, S or T residue at a position corresponding to position 74 of SEQ ID NO: 1.

24. The method of any one of claims 17-19, wherein said center sequence consists of TCAA, and wherein said modifying step comprises modifying said first subunit to comprise one or more of the following residues:
(a) an A, G, H, K, N, Q, R, or S residue at a position corresponding to position 48 of SEQ ID NO: 1;
(b) a C, R, S, or T residue at a position corresponding to position 50 of SEQ ID NO: 1;
(c) a G, R, S, or T residue at a position corresponding to position 71 of SEQ ID NO: 1;
(d) a G, H, P, R, S, or T residue at a position corresponding to position 72 of SEQ ID NO: 1;
(e) an I or V residue at a position corresponding to position 73 of SEQ ID NO: 1; and
(f) an A or S residue at a position corresponding to position 74 of SEQ ID NO: 1.

25. The method of any one of claims 17-20, wherein said center sequence consists of ACAA, ACAG, ACAT, ACGC, ACGG, or ACGT, and wherein said modifying step comprises modifying said second subunit to comprise one or more of the following residues:
(a) an A, C, G, H, K, L, N, Q, R, S, or T residue at a position corresponding to position 48 of SEQ ID NO: 1;
(b) an A, C, G, H, K, L, N, Q, R, S, or T residue at a position corresponding to position 50 of SEQ ID NO: 1;
(c) an A, D, E, G, H, K, N, P, R, S, or T residue at a position corresponding to position 71 of SEQ ID NO: 1;
(d) an A, G, H, K, M, N, P, P, Q, R, S, or T residue at a position corresponding to position 72 of SEQ ID NO: 1;
(e) an A, C, G, H, I, R, S, T, or V residue at a position corresponding to position 73 of SEQ ID NO: 1;
(f) optionally an R residue at a position directly following position corresponding to position 73 of SEQ ID NO: 1 (73B); and
(g) an A, C, S, or T residue at a position corresponding to position 74 of SEQ ID NO: 1.

26. The method of any one of claims 17-19 or claim 21, wherein said center sequence consists of ATAA, ATAG, ATAT, ATGA, or ATGG, and wherein said modifying step comprises modifying said second subunit to comprise one or more of the following residues:
(a) an A, C, G, H, K, N, Q, R, S, or T residue at a position corresponding to position 48 of SEQ ID NO: 1;
(b) an A, C, E, I, K, N, Q, R, S, or T residue at a position corresponding to position 50 of SEQ ID NO: 1;
(c) an A, C, E, I, K, N, Q, R, S, or T residue at a position corresponding to position 71 of SEQ ID NO: 1;
(d) an A, G, H, K, N, Q, R, S, T, V, or Y residue at a position corresponding to position 72 of SEQ ID NO: 1;
(e) an A, C, G, H, I, R, S, or V residue at a position corresponding to position 73 of SEQ ID NO: 1;
(f) optionally an R residue at a position directly following position corresponding to position 73 of SEQ ID NO: 1 (73B); and
(g) an A, C, S, or T residue at a position corresponding to position 74 of SEQ ID NO: 1.

27. The method of any one of claims 17-19 or claim 22, wherein said center sequence consists of GCAA, GCAT, GCGA, or GCAG, and wherein said modifying step comprises modifying said second subunit to comprise one or more of the following residues:
(a) an A, C, G, H, I, K, L, N, Q, R, S, or T residue at a position corresponding to position 48 of SEQ ID NO: 1;
(b) a C, E, H, K, Q, R, S, T, or V residue at a position corresponding to position 50 of SEQ ID NO: 1;
(c) an A, G, H, K, R, S, T, or Y residue at a position corresponding to position 71 of SEQ ID NO: 1;
(d) an A, C, E, G, H, K, N, Q, R, S, T, or Y residue at a position corresponding to position 72 of SEQ ID NO: 1;
(e) an A, C, G, H, I, R, S, or V residue at a position corresponding to position 73 of SEQ ID NO: 1; and
(f) an A, S, or T residue at a position corresponding to position 74 of SEQ ID NO: 1.

28. The method of any one of claims 17-19 or claim 23, wherein said center sequence consists of TTGG or TTAA, and wherein said modifying step comprises modifying said second subunit to comprise one or more of the following residues:
(a) an A, K, S, or T residue at a position corresponding to position 48 of SEQ ID NO: 1;
(b) a C, E, K, R, or T residue at a position corresponding to position 50 of SEQ ID NO: 1;
(c) an A, D, G, K, Q, R, S, or T residue at a position corresponding to position 71 of SEQ ID NO: 1;
(d) a G, I, R, S, T, or V residue at a position corresponding to position 72 of SEQ ID NO: 1;
(e) an I, R, or V residue at a position corresponding to position 73 of SEQ ID NO: 1; and
(f) an A, S, or T residue at a position corresponding to position 74 of SEQ ID NO: 1.

29. The method of any one of claims 17-19 or claim 24, wherein said center sequence consists of TCAA, and wherein said modifying step comprises modifying said second subunit to comprise one or more of the following residues:
(a) a K or S residue at a position corresponding to position 48 of SEQ ID NO: 1;
(b) a C, K, R, or T residue at a position corresponding to position 50 of SEQ ID NO: 1;
(c) a G, R, or T residue at a position corresponding to position 71 of SEQ ID NO: 1;
(d) a G, P, R, S, or T residue at a position corresponding to position 72 of SEQ ID NO: 1;
(e) a I or V residue at a position corresponding to position 73 of SEQ ID NO: 1; and
(f) an A, S, or T residue at a position corresponding to position 74 of SEQ ID NO: 1.

30. The method of any one of claims 17-29, wherein:
(a) said center sequence is ACAA and said first subunit comprises residues corresponding to residues 48, 50, 71, 72, 73, and 74 of any one of SEQ ID NOs: 11-33,
(b) said center sequence is ACAG and said first subunit comprises residues corresponding to residues 48, 50, 71, 72, 73, and 74 of any one of SEQ ID NOs: 36-43,
(c) said center sequence is ACAT and said first subunit comprises residues corresponding to residues 48, 50, 71, 72, 73, and 74 of any one of SEQ ID NOs: 46-67,
(d) said center sequence is ACGA and said first subunit comprises residues corresponding to residues 48, 50, 71, 72, 73, and 74 of any one of SEQ ID NOs: 70-89,
(e) said center sequence is ACGC and said first subunit comprises residues corresponding to residues 48, 50, 71, 72, 73, and 74 of any one of SEQ ID NOs: 92-118,
(f) said center sequence is ACGG and said first subunit comprises residues corresponding to residues 48, 50, 71, 72, 73, and 74 of any one of SEQ ID NOs: 121-135,
(g) said center sequence is ACGT and said first subunit comprises residues corresponding to residues 48, 50, 71, 72, 73, and 74 of any one of SEQ ID NOs: 138-156,
(h) said center sequence is ATAA and said first subunit comprises residues corresponding to residues 48, 50, 71, 72, 73, and 74 of any one of SEQ ID NOs: 159-183,
(i) said center sequence is ATAG and said first subunit comprises residues corresponding to residues 48, 50, 71, 72, 73, and 74 of any one of SEQ ID NOs: 186-199,
(j) said center sequence is ATAT and said first subunit comprises residues corresponding to residues 48, 50, 71, 72, 73, and 74 of any one of SEQ ID NOs: 202-219,
(k) said center sequence is ATGA and said first subunit comprises residues corresponding to residues 48, 50, 71, 72, 73, and 74 of any one of SEQ ID NOs: 222-243,
(l) said center sequence is ATGG and said first subunit comprises residues corresponding to residues 48, 50, 71, 72, 73, and 74 of any one of SEQ ID NOs: 246-247,
(m) said center sequence is TTGG and said first subunit comprises residues corresponding to residues 48, 50, 71, 72, 73, and 74 of any one of SEQ ID NOs: 250-266,
(n) said center sequence is GCAA and said first subunit comprises residues corresponding to residues 48, 50, 71, 72, 73, and 74 of any one of SEQ ID NOs: 269-291,
(o) said center sequence is GCAT and said first subunit comprises residues corresponding to residues 48, 50, 71, 72, 73, and 74 of any one of SEQ ID NOs: 294-313,
(p) said center sequence is GCGA and said first subunit comprises residues corresponding to residues 48, 50, 71, 72, 73, and 74 of any one of SEQ ID NOs: 316-325,
(q) said center sequence is GCAG and said first subunit comprises residues corresponding to residues 48, 50, 71, 72, 73, and 74 of any one of SEQ ID NOs: 328-330,
(r) said center sequence is TCAA and said first subunit comprises residues corresponding to residues 48, 50, 71, 72, 73, and 74 of any one of SEQ ID NOs: 333-340, or
(s) said center sequence is TTAA and said first subunit comprises residues corresponding to residues 48, 50, 71, 72, 73, and 74 of any one of SEQ ID NOs: 343-357.

31. The method of any one of claims 17-30, wherein:
(a) said center sequence is ACAA and said second subunit comprises residues corresponding to residues 48, 50, 71, 72, 73, and 74 of any one of SEQ ID NOs: 11-33,
(b) said center sequence is ACAG and said second subunit comprises residues corresponding to residues 48, 50, 71, 72, 73, and 74 of any one of SEQ ID NOs: 36-43,
(c) said center sequence is ACAT and said second subunit comprises residues corresponding to residues 48, 50, 71, 72, 73, and 74 of any one of SEQ ID NOs: 46-67,
(d) said center sequence is ACGA and said second subunit comprises residues corresponding to residues 48, 50, 71, 72, 73, and 74 of any one of SEQ ID NOs: 70-89,
(e) said center sequence is ACGC and said second subunit comprises residues corresponding to residues 48, 50, 71, 72, 73, and 74 of any one of SEQ ID NOs: 92-118,
(f) said center sequence is ACGG and said second subunit comprises residues corresponding to residues 48, 50, 71, 72, 73, and 74 of any one of SEQ ID NOs: 121-135,
(g) said center sequence is ACGT and said second subunit comprises residues corresponding to residues 48, 50, 71, 72, 73, and 74 of any one of SEQ ID NOs: 138-156,
(h) said center sequence is ATAA and said second subunit comprises residues corresponding to residues 48, 50, 71, 72, 73, and 74 of any one of SEQ ID NOs: 159-183,
(i) said center sequence is ATAG and said second subunit comprises residues corresponding to residues 48, 50, 71, 72, 73, and 74 of any one of SEQ ID NOs: 186-199,
(j) said center sequence is ATAT and said second subunit comprises residues corresponding to residues 48, 50, 71, 72, 73, and 74 of any one of SEQ ID NOs: 202-219,
(k) said center sequence is ATGA and said second subunit comprises residues corresponding to residues 48, 50, 71, 72, 73, and 74 of any one of SEQ ID NOs: 222-243,
(l) said center sequence is ATGG and said second subunit comprises residues corresponding to residues 48, 50, 71, 72, 73, and 74 of any one of SEQ ID NOs: 246-247,
(m) said center sequence is TTGG and said second subunit comprises residues corresponding to residues 48, 50, 71, 72, 73, and 74 of any one of SEQ ID NOs: 250-266,
(n) said center sequence is GCAA and said second subunit comprises residues corresponding to residues 48, 50, 71, 72, 73, and 74 of any one of SEQ ID NOs: 269-291,
(o) said center sequence is GCAT and said second subunit comprises residues corresponding to residues 48, 50, 71, 72, 73, and 74 of any one of SEQ ID NOs: 294-313,
(p) said center sequence is GCGA and said second subunit comprises residues corresponding to residues 48, 50, 71, 72, 73, and 74 of any one of SEQ ID NOs: 316-325,
(q) said center sequence is GCAG and said second subunit comprises residues corresponding to residues 48, 50, 71, 72, 73, and 74 of any one of SEQ ID NOs: 328-330,
(r) said center sequence is TCAA and said second subunit comprises residues corresponding to residues 48, 50, 71, 72, 73, and 74 of any one of SEQ ID NOs: 333-340, or
(s) said center sequence is TTAA and said second subunit comprises residues corresponding to residues 48, 50, 71, 72, 73, and 74 of any one of SEQ ID NOs: 343-357.

32. An engineered meganuclease that binds and cleaves a recognition sequence comprising a center sequence consisting of GTAA, GTAG, GTAT, GTGA, GTGC, GTGG, or GTGT, wherein said engineered meganuclease comprises a first subunit and a second subunit, wherein said first subunit comprises an amino acid sequence derived from SEQ ID NO: 1, and wherein said first subunit comprises a substitution at one or more positions corresponding to positions 48, 50, 71, 72, 73, and 74 of SEQ ID NO: 1.

33. The engineered meganuclease of claim 32, wherein said first subunit comprises one or more of the following residues:
(a) an A, C, G, H, K, L, M, N, Q, R, S, T, or V residue at a position corresponding to position 48 of SEQ ID NO: 1;
(b) an A, C, E, G, I, K, L, Q, R, S, T, or V residue at a position corresponding to position 50 of SEQ ID NO: 1;
(c) an A, D, E, F, G, H, I, K, L, N, Q, R, S, T, V, or Y residue at a position corresponding to position 71 of SEQ ID NO: 1;
(d) an A, C, D, G, H, K, M, N, P, Q, R, S, T, V, W, or Y residue at a position corresponding to position 72 of SEQ ID NO: 1;
(e) an A, C, I, L, N, R, S, T, or V residue at a position corresponding to position 73 of SEQ ID NO: 1; and
(f) an A, C, G, S, or T residue at a position corresponding to position 74 of SEQ ID NO: 1.

34. The engineered meganuclease of claim 32 or claim 33, wherein said second subunit comprises one or more of the following residues:
(a) a K residue at a position corresponding to position 48 of SEQ ID NO: 1;
(b) a Q residue at a position corresponding to position 50 of SEQ ID NO: 1;
(c) a G residue at a position corresponding to position 71 of SEQ ID NO: 1;
(d) a S residue at a position corresponding to position 72 of SEQ ID NO: 1;
(e) a V residue at a position corresponding to position 73 of SEQ ID NO: 1; and
(f) a S residue at a position corresponding to position 74 of SEQ ID NO: 1.

35. The engineered meganuclease of any one of claims 32-34, wherein:
(a) said center sequence is GTAA and said first subunit comprises residues corresponding to residues 48, 50, 71, 72, 73, and 74 of any one of SEQ ID NOs: 360-389,
(b) said center sequence is GTAG and said first subunit comprises residues corresponding to residues 48, 50, 71, 72, 73, and 74 of any one of SEQ ID NOs: 392-399,
(c) said center sequence is GTAT and said first subunit comprises residues corresponding to residues 48, 50, 71, 72, 73, and 74 of any one of SEQ ID NOs: 402-433,
(d) said center sequence is GTGA and said first subunit comprises residues corresponding to residues 48, 50, 71, 72, 73, and 74 of any one of SEQ ID NOs: 436-462,
(e) said center sequence is GTGC and said first subunit comprises residues corresponding to residues 48, 50, 71, 72, 73, and 74 of any one of SEQ ID NOs: 465-495,
(f) said center sequence is GTGG and said first subunit comprises residues corresponding to residues 48, 50, 71, 72, 73, and 74 of any one of SEQ ID NOs: 498-501, or
(g) said center sequence is GTGT and said first subunit comprises residues corresponding to residues 48, 50, 71, 72, 73, and 74 of any one of SEQ ID NOs: 504-529.

36. A method for cleaving double-stranded DNA at a target site comprising a meganuclease recognition sequence, wherein said recognition sequence comprises a center sequence consisting of GTAA, GTAG, GTAT, GTGA, GTGC, GTGG, or GTGT, wherein said method comprises contacting said double-stranded DNA having said target site with an engineered meganuclease of any one of claims 32-35, wherein said engineered meganuclease binds and cleaves said recognition sequence.

37. A method for increasing the cleavage activity of an engineered meganuclease that binds and cleaves a recognition sequence comprising a center sequence consisting of GTAA, GTAG, GTAT, GTGA, GTGC, GTGG, or GTGT, wherein said engineered meganuclease comprises a first subunit and a second subunit, wherein said first subunit comprises an amino acid sequence derived from SEQ ID NO: 1, said method comprising modifying said first subunit at one or more positions corresponding to positions 48, 50, 71, 72, 73, and 74 of SEQ ID NO: 1, wherein said modified nuclease has increased cleavage activity when compared to a control engineered meganuclease.

38. The method of claim 37, wherein said modifying step comprises modifying said first subunit to comprise one or more of the following residues:
(a) an A, C, G, H, K, L, M, N, Q, R, S, T, or V residue at a position corresponding to position 48 of SEQ ID NO: 1;
(b) an A, C, E, G, I, K, L, Q, R, S, T, or V residue at a position corresponding to position 50 of SEQ ID NO: 1;
(c) an A, D, E, F, G, H, I, K, L, N, Q, R, S, T, V, or Y residue at a position corresponding to position 71 of SEQ ID NO: 1;
(d) an A, C, D, G, H, K, M, N, P, Q, R, S, T, V, W, or Y residue at a position corresponding to position 72 of SEQ ID NO: 1;
(e) an A, C, I, L, N, R, S, T, or V residue at a position corresponding to position 73 of SEQ ID NO: 1; and
(f) an A, C, G, S, or T residue at a position corresponding to position 74 of SEQ ID NO: 1.

39. The method of claim 37 or claim 38, wherein said second subunit comprises one or more of the following residues:
(a) a K residue at a position corresponding to position 48 of SEQ ID NO: 1;
(b) a Q residue at a position corresponding to position 50 of SEQ ID NO: 1;
(c) a G residue at a position corresponding to position 71 of SEQ ID NO: 1;
(d) a S residue at a position corresponding to position 72 of SEQ ID NO: 1;
(e) a V residue at a position corresponding to position 73 of SEQ ID NO: 1; and
(f) a S residue at a position corresponding to position 74 of SEQ ID NO: 1.

40. The method of any one of claims 37-39, wherein:
(a) said center sequence is GTAA and said first subunit comprises residues corresponding to residues 48, 50, 71, 72, 73, and 74 of any one of SEQ ID NOs: 360-389,
(b) said center sequence is GTAG and said first subunit comprises residues corresponding to residues 48, 50, 71, 72, 73, and 74 of any one of SEQ ID NOs: 392-399,
(c) said center sequence is GTAT and said first subunit comprises residues corresponding to residues 48, 50, 71, 72, 73, and 74 of any one of SEQ ID NOs: 402-433,
(d) said center sequence is GTGA and said first subunit comprises residues corresponding to residues 48, 50, 71, 72, 73, and 74 of any one of SEQ ID NOs: 436-462,
(e) said center sequence is GTGC and said first subunit comprises residues corresponding to residues 48, 50, 71, 72, 73, and 74 of any one of SEQ ID NOs: 465-495,
(f) said center sequence is GTGG and said first subunit comprises residues corresponding to residues 48, 50, 71, 72, 73, and 74 of any one of SEQ ID NOs: 498-501, or
(g) said center sequence is GTGT and said first subunit comprises residues corresponding to residues 48, 50, 71, 72, 73, and 74 of any one of SEQ ID NOs: 504-529.

41. A polynucleotide comprising a nucleic acid sequence encoding said engineered meganuclease of any one of claims 1-15 or claims 32-35.

42. The polynucleotide of claim 41, wherein said polynucleotide is an mRNA.

43. A recombinant DNA construct comprising a polynucleotide comprising a nucleic acid sequence encoding said engineered meganuclease of any one of claims 1-15 or claims 32-35.

44. The recombinant DNA construct of claim 43, wherein said recombinant DNA construct encodes a recombinant virus comprising said polynucleotide.

45. The recombinant DNA construct of claim 44, wherein said recombinant virus is a recombinant adenovirus, a recombinant lentivirus, a recombinant retrovirus, or a recombinant adeno-associated virus (AAV).

46. The recombinant DNA construct of claim 44 or claim 45, wherein said recombinant virus is a recombinant AAV.

47. A recombinant virus comprising a polynucleotide comprising a nucleic acid sequence encoding said engineered meganuclease of any one of claims 1-15 or claims 32-35.

48. The recombinant virus of claim 47, wherein said recombinant virus is a recombinant adenovirus, a recombinant lentivirus, a recombinant retrovirus, or a recombinant AAV.

49. The recombinant virus of claim 48, wherein said recombinant virus is a recombinant AAV.

50. A method for producing a genetically-modified eukaryotic cell having a disrupted target sequence in a chromosome of said genetically-modified eukaryotic cell, said method comprising:
introducing into a eukaryotic cell a polynucleotide comprising a nucleic acid sequence encoding said engineered meganuclease of any one of claims 1-15 or claims 32-35, wherein said engineered meganuclease is expressed in said eukaryotic cell;
wherein said engineered meganuclease produces a cleavage site in said chromosome at a recognition sequence, and wherein said target sequence is disrupted by non-homologous end-joining at said cleavage site.

51. The method of claim 50, wherein said nucleic acid is introduced into said eukaryotic cell by an mRNA or a recombinant virus.

52. The method of claim 50 or claim 51, wherein said eukaryotic cell is a mammalian cell.

53. The method of any one of claims 50-52, wherein said eukaryotic cell is a human cell.

54. The method of claim 50 or claim 51, wherein said eukaryotic cell is a plant cell.

55. A method for producing a genetically-modified eukaryotic having a disrupted target sequence in a chromosome of said genetically-modified eukaryotic cell, said method comprising:
introducing into a eukaryotic cell said engineered meganuclease of any one of claims 1-15 or claims 32-35;
wherein said engineered meganuclease produces a cleavage site in said chromosome at a recognition sequence, and wherein said target sequence is disrupted by non-homologous end-joining at said cleavage site.

56. The method of claim 55, wherein said eukaryotic cell is a mammalian cell.

57. The method of claim 55 or claim 56, wherein said eukaryotic cell is a human cell.

58. The method of claim 55, wherein said eukaryotic cell is a plant cell.

59. A method for producing a genetically-modified eukaryotic cell comprising an exogenous sequence of interest inserted into a chromosome of said genetically-modified eukaryotic cell, said method comprising introducing into a eukaryotic cell one or more polynucleotides comprising:
(a) a first nucleic acid sequence encoding said engineered meganuclease of any one of claims 1-15 or claims 32-35, wherein said engineered meganuclease is expressed in said eukaryotic cell; and
(b) a second nucleic acid sequence comprising said sequence of interest;
wherein said engineered meganuclease produces a cleavage site in said chromosome at a recognition sequence;
and wherein said sequence of interest is inserted into said chromosome at said cleavage site.

60. The method of claim 59, wherein said second nucleic acid sequence further comprises sequences homologous to sequences flanking said cleavage site and said sequence of interest is inserted at said cleavage site by homologous recombination.

61. The method of claim 59 or claim 60, wherein said first nucleic acid sequence is introduced into said eukaryotic cell by an mRNA or a recombinant virus.

62. The method of any one of claims 59-61, wherein said second nucleic acid is introduced into said eukaryotic cell by a recombinant virus.

63. The method of any one of claims 59-62, wherein said eukaryotic cell is a mammalian cell.

64. The method of any one of claims 59-63, wherein said eukaryotic cell is a human cell.

65. The method of any one of claims 59-62, wherein said eukaryotic cell is a plant cell.

66. A method for producing a genetically-modified eukaryotic cell comprising an exogenous sequence of interest inserted into a chromosome of said genetically modified eukaryotic cell, said method comprising:
(a) introducing said engineered meganuclease of any one of claims 1-15 or claims 32-35 into a eukaryotic cell; and
(b) introducing a polynucleotide comprising a nucleic acid sequence comprising said sequence of interest into said eukaryotic cell;
wherein said engineered meganuclease produces a cleavage site in said chromosome at a recognition sequence; and
wherein said sequence of interest is inserted into said chromosome at said cleavage site.

67. The method of claim 66, wherein said polynucleotide further comprises sequences homologous to sequences flanking said cleavage site and said sequence of interest is inserted at said cleavage site by homologous recombination.

68. The method of claim 66 or claim 67, wherein said polynucleotide is introduced into said eukaryotic cell by a recombinant virus.

69. The method of any one of claims 66-68, wherein said eukaryotic cell is a mammalian cell.

70. The method of any one of claims 66-69, wherein said eukaryotic cell is a human cell.

71. The method of any one of claims 66-70, wherein said eukaryotic cell is a plant cell.

72. A genetically-modified eukaryotic cell prepared by the method of any one of claims 50-71.

73. A pharmaceutical composition comprising a pharmaceutically-acceptable carrier and said engineered meganuclease, or a polynucleotide comprising a nucleic acid sequence encoding said engineered meganuclease, of any one of claims 1-15 or claims 32-35.

74. The pharmaceutical composition of claim 73, wherein said polynucleotide is an mRNA.

75. The pharmaceutical composition of claim 74, wherein said mRNA is encapsulated in a lipid nanoparticle.

76. The pharmaceutical composition of any one of claims 73-75, wherein said pharmaceutical composition comprises a recombinant DNA construct comprising said polynucleotide.

77. The pharmaceutical composition of any one of claims 73-76, wherein said pharmaceutical composition comprises a recombinant virus comprising said polynucleotide.

78. The pharmaceutical composition of claim 77, wherein said recombinant virus is a recombinant AAV.
